United States Patent Application Publication US 2026/0258423 A1 - sequence listing, part 44

SEQ ID NO: 301568 - DNA, 83257441 bp, Homo sapiens (residues 10,674,036-12,808,842 of 83,257,441)
  source 1..83257441: mol_type = genomic DNA
attgggtaaaaattaatagactctgtggtattgggggttgaggagaatccatgtgcctaagactgaggtggggatcttgttaaaatacagactgtgggccaggcgtggtggctcacatctgtaatccccagtactttgggaggccaaggcgggtggatcacctgaggtcaggagttcaagaccagcctggccaacatggcgagatcctgtttctactaaaaatacaaaaattaccatgcacgccaccgggcatggtggcgggcgcctgtaatcccagctacttgggaggctgaggcagcagaatcacttgaaccagggaggtggaggttgcagtgagccaagatcgcaccactgctctccagcctaggcaacaagagcgaaactccatctcaaaacaaacaaacaaacaaacaaaaaaacagactgtgattgaggagagctggagtggagcctgagaagctgcatttctgctaagtaccccagtggtgtgacactgccggaccacagactacactgagtagcaaggctgtagagggagtctgagtattagctttgctacaaacttgtagataattcaccacttgggcccttcttcctctatacagtgaggacataccagatggtgtgtgacacgtctgacattgtgatggcgaaaccacctcaaggtcctcacgaaaccttggtggccaaggcccttggtatgacctcttgagaccaggaggctctcacaggcatctacagagctcagccttggccccttacctttgcatcatccttgaatggaaaaaggatcacgggctgccaactgcagacccacccaggaatacttcagatggctcaaacacagtggtaatgtccctggcttactccatcaaaatgcagtgagcatcatcagagtggtccggagcttgactgacaacgaccagctgctgctcaccacagcagccaacaaggaatgtgcccactctccccttcagtttgctcctcctcagtgtcagggtcccagggccctagaagtctctaaaagccactgagcaaacttctttgcctctcaaagctgtggcaactttaggtccgtcctccagcttaggggtgactagagcgattgatttcctgccccttcaactgagggtgagaagacactgtctctggggcctaagtgtggctactctgctctgccacaccacacctgaggcccactctcctaccatctgcctcctgctgttgctgaagcttgctgacactttctccacgctgtcttctttcaggccttctctcgcctgggcaacctgatgctggcattagcttttatctctctgcccaagctacagcaaattgctgagagctgtccaatgcattctccacatcacagacttgctttctttcaagactgccttttgcagggactctttttcccctctacttttcttttggagttatagggtgcaaacagtaaaaggcataaatcttaagttcaaagtttaatatgtttttatgtatgtaaatcatcacccagatcaagctactgaacatttcaatggctctggaagctctcctggcacccccttctgaattactaaccatctcacctcctgccagagttaagcactattctgacttttaacacgatgggttagttttccctgttctcctagtatcatacttcatcctaacacaattattcctgttttacaaatttaaagaaaaaaaacacccaacaacgaggacaaatgcgttagtctttttaaactggtccaacctgaataacgccaccctatgtttaagaatgggaagagaggcttggcggggagggttgtctttccctagggttgtgtcttccttgaactgggtgcaaacatggacaaagtcacatgtatgacatggagacaacacatccccacaacgaactgcatcatagctccttgaaatcaaaggaccaaattataaacgagtttacactgactggatatttgatattaagcaaaaaccaaacgacaaaatccaagagcaaaaacaaaaacctttttgctgtgctgatgaaactgtggttgtttttttctttctttcttttttgttttttgagacaactcttgttgcccaggctggagtgcagtggcgtgatctcggctcactgcaacctccgcctcccagattcacacgattctcctacctcagcctcccgagtagctgggattacaggcacccgccaccacgcccggctaactttggtatttttagtagagacgggtttctccatgttggtcaggccagtctcgaactctcaacctcaggtgatccacccgcctttgcttcccaaagtactgggattacaggcatgagccaccgtgcccagccaactgtggttgtttttaaaggacaaagttggtctctttcagaggcacatgctgggaatgggctggggtggcagtgggtgggggggtgcagacaaaattaaatggtggtaatcactgaagcttgctgatgggtacatcaattagttaactattctactttttgaataagtttccaaattttcacaataaaaaggaaaaaaagaaaactcaagttttctttcggttaaatacccacatcaatgttctcatgaaatagtgcacagagtcagtgactttaaggccccttatgagggggacattagcatcctcatgttgaagattgaaaggaaatacctccaagtattatttcttggtagtggaacaacagtgattgaaaattttcttccttcaacttttctgtatgccaaactttctttactgaggatatagtataattacggaagaagagccaacaaactttcaaatacattggaaaagtatatagaaaataattacccctataaggtctaaaggtgttattaaggaatatgtggctaaagaggctattacttgaatcttgttaatgaatagaaataaccgtccattttgttacacagtaatataacccctaactggtaagtaaaaagcacaaactaggccgggcgcagtggctcacgcgtgtaatcccagcactttgggaggccaaggcgggcggatcacctgaggttgagagttcgagaccagcctgaccaacatggagaaacccgtctctactaaaaatacaaaaatttagctgggtgtgctggtgggcgcctgtaatcccagctactcgggagactcaggctggagaatcgcttgaacctgggaggcggaggttgcagtgagccaagattatgccattattgcattccagcctgcgtgagaagagcgagactccatctcaaaaagaaacaaataacaacaacaaaataaaaaccaaaaaaaagtacaaactaattgggtaacaaatgctcgcatgggtgactgctcttttaaaggtagctcatatacacatacacaaagatttaaatggtactaaacagaaaaccaaaaaaggtttgggagattatggatgatttgaaaatattaatgtcaatttcttttaaacataaatttaagaacaataaaagctattttaaaggatcttatgcagacgcatttacaatttaaaatcattagcctcccaactcgcatattttactggtagtcagtaaatctcacctcttacacttaagatatcagctgcttcatgaacagccagacacatgaatacattcatgcctactgcattgataggattcttatacttttcaaataaacaagtggcatttcttaaaatattaattctattgaagagtctagtgaaaacactgtaacccacccaggtaaagatttgcaagggatatttcactgaaacacagccttgaggccgggcgtggtggctcacacctgtaatcccagcactttgggaggccgaggcggcggatcacctgaggtcgggagtttgagaccagtctgaccaacatagagaaacccagtctctactaaaaatacaaaattagccgggtgtggtggcacatgcttgtaatcccagctacttgggaggctgaggcaggagaattgcttgaacctgggaggtggaggttgcagtgagctgagattgcgccattgcactccagcctgggcaacaagagtgaaactctgtctcaaaaaagaaaagaaaaaaaaaacagccttgcttttgatttcccaagatttgcagctgaaaaacgttgccccactggcatacggaacctccgttttggttggattcacacagtcaccataagcgcacgatagcagcagaacaaacaggaacctacctagaaattgggacccgagttttgcgccttaattctccgagactgtccccttgtgcataaacaggaacatctggaagacgtcacctctaaggtccccttccccacttctaacattctgacttcaagcctttaaacttgacactagaatgaagaacaaataaaagttttctccaaaagctgctgttccctttttggatcatttcacaagccttaacctgcaacagctgagaacgaagactgaatcttatctaagagcaaacttgctgcaaagggatccacacaaatgttttgtggcttaaaacagataatctttttaaagatttggcctttgagatacttaatatctcttttgttaaatgagaatagtcttttagtaagttcctttcttgaccagattcctaggaaagtcattctaaaccaactgcttccgagctggtttctataaactaaatcttgcagttgtttattaaggaacaggctattgtattagcttgctaggactgccttaccaggtttggtggctaaaacaacagacatttatttcctcacagttctggagcttggaaggcaaaaatcaaggagtcagcagggtttgtttttttttttttttctcacaacttctctcttggcttgtaagatggctgttttctctctggcttctcatggtcgtctcactgtgtctcctattctttttgagacggagtcttgctctgtcgcccaggctggagtacgatggcgcaatcttgcctcactgccacctctgcctcctgggttcaagcgattctcctgcctcagcctccggagtaactgagattacaggcacccgctaccatgcccggctaatttttgtatttttaggagagagacgacgtttcaccatgttggccaggctggtctcgaactcctgaccttaggtgatctgcacgcctcggcctcccaaagtgctgggattacaggcataagccactgtgcccagctaatctattattttaagaacaccagtcatatagaattagggccaacctagcagcctcattttaatttaactatctctctaaagaccctatctccaattacagtcacattctgaagtactgagattagggcttcaatgtataaattttgggggacattattcaacctataactagcatagttttttttcacatacttttactttgatatatttaggtttaagtattgagaatttaaaaaccaaaagacctctatcatgtgcgtgtagaaacatatcatgtaaaaagaatctgttgtctatctaggcattatatttgttgcatcttaggatttactgaaaaacttttggagaactttgcccctagggcagcagcttctggcagaaaaaggccaaacccaggattctagggcagttaaatttagaaacaaaagccaagattcattctatcactcaataatcattttcttcaatggctgacacaccaaaagaagggtcaaatttatttatttttaaattcattttaatttctgtatctctacatagatatatctagagggtctcactctgttgcccaggctggaatgcagtggtgtgattatagctcactgaagccttgaattcctgggctcaagtgatactccatttcagtctcctgagtagccaggactacaggcatgtgccaccatgccaaaaaaatcttctgtagagatgggggcggggggggggggtctcactatgttgcccaggcttgtcttgaatacctaacctctagcaatcctcaggccctggcctcccaaagttttgggattataggcattagccattgtgccaggcaagttatttccccaaaaaacactttcttaagggatggtcccagtccgccagcatccgagtcacctggggtatctgtcatggaagcaggtctctgcatcatactgcagattcagtgaattcagctctgggtctggggaactgcacttcagcaagcgtcccacccacctgcccgctggagcctgtgggtctctttcctgagaactgtgtgcagccatctatgtacccactcatcacccatgaaaaagatcacgcttgtctgaacagcaaaactgagtatgtttactttacacaaagtacaatccagtatatgcagaaaggtactcagcatcacactcgtgatcaatatcctcttatttccatttggtatgtcactgaaaacctggcacaccacttagctaaaaatcacataaaagaacccctagagaaatcaaactgatgttttttttcccccaaacaatagatttcctcttcattagtcaaatctgatagtgatattcattaataaggaaaactaaagttttcaagcatcaactctgaatggcagagaccctaatctgactgttattagccaccaagaactcagaagagcaaagaactcaagaagaggcaagcaagagcactatggaaattatattcttttctgtgaaattcagtcccacagctatttgagcaagggcccaagacgatggagaggcggcaaagctgctgggagggcctgttcgcaggcaggaatgcactggctgtgcctcgccccgccatgtccttccacaggtgggctcttcactggcttcacttcagcttgatcctctggtctccccacagcttcctgggagactttgggttgtaatctttacagttccaagaatcaattttggttgaacgcaagggtaacatccccatccaaaacagaaatgttctcatggtatgaaggccattctgtagagtgcacgtatatatgtttatatttatataggctcctatgcgagacagtttccttcctcttagcaagagaatactgcatccagcaacactgctttggctagctcttttttctgtatggcctcatgtgtgtggcaattgaagcagctatttctcccttcctcttgttctggccaaaataatctagaaactcaccatctggtccaatcaagtacattattattgtgtgatccacctgcagagaaaaggggggagagtgtgacaaagattaccaaaataagctgcttattttactgaatgtatgctgcaagataagagaactttacattaatgcttaaataacctttacagcatctattatttatggaataggcttaagtctatcatagcaaattcctaacaaaaattgtctaaaatcttttgtgtcctaaacatctgcactggttattgcttgtcacatcagctagaacctgaaattcttttggtttaatccttaacatatttacccacacactctgagaaaagaattcaccttctaagaaatagctgctgcaggctttcataaagcagtcaatgtttgtggaatagcaatgcttgttgaaaaataccttcatttttgagtaagatatctcctcagaccctaaacatgttacaaacagacatcacatggaattaagtgttggtgaaaaactgctttctttagtaagttcttgggtttattcatgttttagaaagaactggttgtcattcattactgccaaaattctgcttaccacgctttatgagaagaaatcagaaaactaatcattagtttaaataatctataaatttgaacaatatttagttttaatattagtaattcaaacagaaacaggaaaagaaacatttttctccccaaggaaatttttgtctcctccactgaataatcctatctgaaatcaatccatcacctggaaagcaaatcctcgggagcataaatgctgcccccctaaccagagagtcatcgtaaactcagcatccattttcccagcaaagtcctaaaatggtcccagctctaactttaacttagattagtcatcagattttttagttagacacttccataaaatccaattttaagtgagatttggcacttagagtccttggaatttattgcaggcttgactgctatttggcaagacaaagaaagacaggaatgtgactacaaataccaaactggagacacctcccaaacataccccagcacgcactatatgtctgtgagggtattattttttatacacacattcttaagatagcaaatggaaagagcacttgcctacccacataaggaaagaatgtacaccaaaagagcgccaacaactggattccaagtgctgtgggatagttcaccgcaggagcaagacggggggctacgtttctccacatatttgatacagaaatcagaattaagtctccagttctctcttcaagccttactctgtagcttacatcactctttctccctatttcttccttttctctattctctgttaaaaaaaacaaactacagtatgtgggacttattttctgagtgttcttaatataaattaccttgtagtacacaacaaaaatattattttatctgtatctgtcgaacttgtcagaggtcactcctcaatattcctttgggttgtgacagagcacattgacatttattctaatacagaggtctacagaggtcttccaagttctagtacttccttgtatagaaaaaggacactagcattaactgacaaattctttcacatgtcatcttaagccatgaaacaggtattctcctcctcttcaaatgatatcacaggctggagagagtaaattatataattggtaagtgccaggcctaactttaaaacctagaatctgtccagtttcaaagtccacaaacttttatcaccacgttgcctctagctccaattctaatggagagcagcaactcagtttttctagtgtgcaagttacgttttagtgtgaattattttttgaaaaggtaatatatgcacatagaaaacgaatatccagttaatgtatacaatgaaaatgtccctccccctcttcacacccagagtgcctcagttccccttagagtgaaccaatgccatcagttccttctgtatccttccgaagaaattctctgcatctactatgtgtatatatccactaccacttattttttttatacacaagtaacaatatattctacagtacttgctttctcatttaacaatatattggacattgttctacgttagattatacacagtagttaaaaaatggttactggattttcagttttttctctttaaaaacaatgccatagggtatatttataggataaagtccaaaaagtagaatctcttgcataaaaagtatataactttaaatgtgagaaatactgttaaactgccctctgaagagggtgtatgagtttaattcctatcaacaatgcatgagtgtgcctgctgttccaaattcactcctgcagtttatttcctgcttttccaatttcgacaatatattttcagattttctgaccactgctgagccaagagaaaaatgttacctcattatacaattcacatttcttttattatgaaactgcacatttaggtttgaaagctatttgtattcttttttcaaaagtattttctaactaatatctatataataatatagtattatatatatataatacaataatgtgcagatccagctttctatggaattccaaatatttggtatacccagttcgatcactctgaagagtccactcaaaagccagaagcttgcctgttgttgctgtcgtttgggattaagaaaacttcattccattacatctcaacattaaccttaaaggtacccccttacttcctgcaggtccttaaatgataacagaagtttcccaaaccatcctatggatgaaaatctgtgacctcaagggactgaagtcatactaatgaaaaacctaagaagctgaagaatgtctccccctattggatgatttagcaaatgtacagcatgaattcctcatcgaatctcatcaaaagtcaaattcttatggcagtaggccagtatttctcaaaatggggccaaagatacattctacaaggtccaagaagtttccataagacttacatatttttgttttcatttgtaattaaaaacattaatatccatattctggattatctgtgttgtgagtataaatttcagtgcccaggcttgtgtttgctccatgatctcactggcacctagctgcccactgctgttacaggcagacatgaatatgatacattcttgccaaatcaacactaaccaggcaaggcaggctacacgattaaaggtttcaaagtattttaaatagaaaatgcagaggggcagttgagtagagttgggtatgtgatagcagtctgaccaaaaccccctcccttcttgccctgagcagcactttggtttcagcaaaatctcttgtcaatgtaactgaatgttttcaatttaagttttgcaggctgtttgggtttatttgtacaactgctttctgatttgactttctgactctgagttatgagttctaagcatcaagactatggagtgttacctagtttaggactgtatacatttaaacaatttaatataactcatttaatgctggaaatcagactgatgagctcatctattcctgctgtcatcatcggataaactcaaaaccagttaatacaactctctataaagacagaagtccggaaagtccttttcctatggtttcctcttttggccactgtggctctctgctcttctctcattctgctagagaagcagcaagaggaaaacagaggagggtccctctactttccttacaattaaggcttaaagaaaagtgctcatttttctcatcttttactccaaggaatccaagtttccctaattctacgaggcaccacatctggaagacaggattactgtgtaggcttaattaaggcaaacaggccagaaccttgcttttaattcaggctgtaggctccaggggcacacacgttccaggttcaaagggacaaagaaatcatagttggctgttgagacaaagcactgcagtgagacatcccatcccctctgcatctcaactcttgggatgggccatggggagctgctggatcagtgactcagggtcttggccatctttctttctacaaagacagcttcacagctagaaaggctcttaggattactctgcccaaacaatattatagaaaaaacagagtatgacaactaagaaaaatactgaaataatgctaaaatacaacgccgactcttcatatgataggagaaaaatgtccaaattgagaggaaaattggtggatagtggtggtgctaatgccttttggtgcttcactgtgaaaccactgacaagaaaagaaacacagtaacttgggcatgaccttaaggcttctggggcagtgctgatgaatatgaagatagttaatttaagagctacacaagtacaacagaatttctgttccttatcattaaaaagcacatatttaacgcctaactgtccaaggcatatagtcaatgggcaaataaacctttcatcttttgcttttcagaattctcattcaacctaaaaatgcagttctccatggcctaaaactggttctccagaagagcaatttctgatacctctactggggacacagtgagaaccaacacaatctttttaaaataagtgttgttccaaatgatggcttctctttatttccaacatggcacccaagtatctggttttaaactgccctaaaatcctatatgccactataagagaaaaacaggcaattgaattatgagaacagtgaatataaatcaaacaatcatcttttaaaaaactgcttctggctgggcgcagtggctcaggcctgtaatcccagcactttgggaggctgaggtgggcagggcagaccacctgaggtcaggaattcgagaccccctggcctcgcctggccaacatggcaaaactccttctctactaaaaatacaaaaactagccaggcgtgggagcacatgcctgtaatcccagctacgcgagaggctgagggaggagaattgcttgaatccgggaggcggaggtcgaagtgagccaagatcgcaccactgcactccagcctggctgacggagtgagactccgtctcgaaaataaataaaaagtaaaaaacatgcttctattatcctttcaaatattcaaaattcctaaggaggctggatgcggtggctcacgtctgtaatcccagtactttgggaggctgaggcgggtaaggtcaggagttcgagaccagcctggccaacgtggtgaaaccccgtctctaccaaaaaatataaaaaagtagccaggtgtggtggcgcgcacctgtaatcccagctactcgggaggctgacataggagaattgcttgaatctgggaggcggaggttgcagtgagcgaagattgtgccactgcactccagcctggatgacagaatgagactccatctcaaaaaaaaaaaaaaaaaaattcctaaggactttgcaataatcttaggtattctctcttctcagaagctagtcagtcattgaaagccttatgactatttgggatctgggagctggtccatgggttaaaactggaacatttactcactatgtagtcttcatcttcgtccttggggccagggctgtaatacactctgtatgctctggccacttgatcgacctcttctctcgtgccagtcaagccaaccagtttgggagaaaattctaaataaaaaatgagagagacagtgaaaaatgagaagccagtaaaacaaccatctctacttcaaaaaatgtatcagttgtaaagcagctctactgccactttcttcctgtgagtctccaaacatttcttcacgattcaaaggaaaaggagaagaaattcacaaagaacaaatgaaaattctcctttgtaatatataagtcaaatctttttatgactatctagtaaagacctggagggaatattttctaatcacttgtatcacattttaaattgatttttaaggagtagtcacatgtagttctcagatatactaaagcttaaaattattatcataaattaaatactataacttttcatggcatcatatggggaaaaaaatttgcttcataactaagttcatatcaggtcaaaatacctgtgtcttattttcctgcaaataatttcaacactggtatcaagttctactctttacttctgatttaaaaaaactggttaattaatactagtcatccccaaaacgcaatcttaacaaagttctgaaataagggcaaatcattcacagcgtgtatctgctattaagtttttggaattcatgtaagtgaaccggtagaggtcacttaaaacaactggattcatcaaactactgaaatgacagcccaacatttaacagcagttcctttttctaaaggtacagaagccaatttttgttccttggatgaactcatcattctaaatgagacattgttcagattctgaaaagacaggctttctttttccactctgagtaaataaagagaaaggtgaatgaagcctgagttagctgcacattcaaactttttttaaaactaaattgctgaaactgcatttttttctaaataccaaattaaagttttaaaaatctccccaaaatgcaactagtaatgactacatcatcaatcgctatgttctgttgaaaattaccataaagtctggtgttttggttaggtacagcaactcgaatgtctactcatttggggatattatggtttggttagtaatatgtgatttttgccaatataacacatgtttaaattgaagactgtgcataactcaatgagttcataaatatctgtttttcattgcttcatgaaatgactatactattgcccaaatttctgacaaacctataaactgtagatataaattatgcttaagtatacgtagtaaaaactctaaacttcaagaagaaaacataaaccttcgtaaccttaggttagtcaaagatttcttatataccaaaccaaaagcactatattaaaaggacaaactgataaatttggacttcattaaaactgaaaactgctgtttgaaaggcactgttaagagactgaaatgacgagccacagactggcagaaaatatttgcaaatcacacacctaacttgtatccagaatataaataatacatatacacataatgtgaaaacaaagaactccataaaaagcggtcaaaagatatgaacagacacttcactaaaggtaatacagatggcaaataagagcataaaaagaagcttaacattaacagtcattaagaaaatgtatgccaaaaccacaatgagatatcactaagcacctactagagtggctaaaattaaaaagactggccacaccaagagtggtgatgctgtggaggagctgggactctcatatactgctggcaggaatgcagaaatataccattttggaaaacaggttctcagtgtcttagaaagttaaaatacacctactatatgatctaaccattcctatcctatttactcaaaagaaatgaaagcatgtgtccacacaaaaacatgtacataaatgttcttagcagctttatctgtaacagccaataaatgcaaaaaactcaaatgtctataggtgaactattagtcagcaacaaaaaggaatgaactatgatacacagaaagtgcagactaatctttatcaatagaaagcagttctgcaggccgggcgcggtggctcacgcctgtaatcccagcactttgggaggccgaggcgggcggatcacgaggtcaggagatcgagaccatcccggctaaaacggtgaaaccccgtctctactaaaaatacaaaaaattagccgggcgtggtagcgggcgcctgtagtcccagctacttgggaggctgaggcaggagaatggcgtgaacccgggaggcggagcttgcagtgagccgagatcccgccactgcactccagcctgggcgacagagcgagactccgtctcaaaaaaaaaaaaaaaaaaaagaaagcagttctgcagatgggagattggggagggaaaaagggagggactaacaaaggcaaaggaaaacttttcagggtaacaggtatgttcattttcttgactgtgggatggtttcagttacaaaaggcaacaaattatatacttcaaatatctatactttattgcatgtcaattataccttaataaatgtgttaaaagtaattacacatacagcagatccttcataaaacatatttttaaataacctcaaagtttagaagatatgtatttgaatgtgtcatataatataaatataaaactattctttagtgcttttaaccagttattaaatcaatgttaccataattaaaattcagattcctgatttttaagcacatatgctgaagaaacttgagtctagagaaattaaacttgcccattttcacagatgaattagaacctaagcatccactctcaattctactataatctgtagtctttaaaagtgcctaacagcttttaactagcatacagaggtgtttgattgaaattcctccattgaaagtaataccttccttagaagcagaaaaaacaatcctaaaattcctatgaaaccacaacagacccctaatagccaaggcaatcttaagcaaaaagaacaaagctggtaggatcacactacctgacttcaaaacatagtacaaagccatagtaaccacaacagcatggtactggcataaaaacagacacacagaccaatggaacagaatagaggaccgagaaattaagccaactgatttctgacaaagacaccaaaaacatacgctggggaaaggacagtctcctcaagaaacggcactaggaaaacgggatatccctacatagtagaatgaaactagatccctatttttatcatatacaaaaatcaaatataaatgtaggaaagacaaatggaagatctgcaactataaaattagtagaagaaaacataggggaaacacttcaggacattagtctgggaaaaaatttgatagataaggcctcaagagcacaggcaacaaaagcaaaaataggcaaatggggttatatcaaaataaaaagcttctgcacagcacaggaaacaataaacagaatgaagagacaacctggagaatgggagaaaatatgtgcaaactattcatcagactagggagttaatatccagaatgtactcaatcatctcaacaccaaaaagacaaataacatttttaaaaagggcaaatgatctaaatagacatttctcaatagaaggcatacagatggccaacaagtatatgaaaaaatgctcaacatcaccaatcacaagggaaatgcaaatcaaaaccacaattaggtatctcatcccaatttgaatgactatcaccaaaaatacaaaaaaataacaaatgctgacaatgattcagaacaaagatacctcacacacaccattgatggaaatgtaaattagtataaccattgtggatagcagtatggaggttcctcagaaaagtaaaaacagaactgcaatacaatccaggaatctcactactgggtatatatccaaaggagatgaaaacagtatattgaagaggcgtctgcattcctatgtttaccacagcactaatcacaatagccaagatatgaaatccaacagtactcatcaacaggtgaatggataaagaaaatgcagtatacatacgtcatggaatactacccagccatattaaagaatgaaatcctgtcatttgtggcaatggagatgagcctggaggatactattaatatgttaaatgaaaaaagtcaggcacagaaagataaatactgcatattcatacgtggaaactaaaaaagttgatctcacagaagtagagagaagaattgtggatactagaggctggaaagggttggggaggatagggactctgtaccccataaatatgtacaactgttatgtgtcaattaaacaacagttactttgtcatagtaaatgttttatttatctttaagacagagtctagctctgttgcccaggctgaagatcagtggcgtgatgtcagctcactgctacctccgcctgccaggttcacgcgaattctcctgcctcagcctcccgaatatctgggattataggtgtgcaccaccgtgcctggctaatttttgtatttttagtagagacggggcttcaccatgttggccaggctggtctcaaactcctgacctcaggtgatccacccactttggtctcccaaagtgctgggattacaggcccaccatgcccggcctgttacagtaaatgttttaaatttataaaacatgcactgagttcaaaatatgtttgtatttaattattcatctttaatctaccaatgaacatacttccagaatatatgtttgttctgattttacaatgcagagaatgagttacagcgctggagttagaagcaatgtgtccttactctcaattcaaggctcgattaacttagttgatacatgaaggccaagttcaaatcctttctctgtgacaaaatataaagagcactgcatcaggaattgagaaacccatttcttacttacgcactaactatccataacaattcctagcttcacctttttattcacccataaaactggtgataataccatttgtcctatttcacaaggcactgtaaggttcaaatgaactgatattccaaaaactttaaggctaaataaatgtaaagtattatttaaaaaaatacctttcacataatttgcgatggcttcttttgtgtccctctctgggtcaatgctgatgaaaagtggagttagatctggcagagttgtaatgctatctgaaagagagttccaattagtccgtattcacaccctaagggaaaagacaaagaaaaccagcaataacaggagagtataggacgtgctggacagctaggtgttttgaaagcagatggacatcttaacattcaggtgaagaggaagaggacggggaaggggatggagaagggatggcctttaggaggaggagacccatatacagtagtattatctgtggtggataatacaaggttacatatcctatcaaatgcctgcaccagcacataaatgttcttcccctggataatgtcatgtggctatcttatctctgaatccactccagtatctgtagtttttttcactcccaccatatctcaagggcaagaaggtaaattgttaataagagctgaatatcctgaaataattcactgtatggaggaggcacccttccttcttactagtactagtaaaatgccacagactgcagaccattgcaaagatttcctaatttaattgtcacaatcagtggggaagaggcaatggcagcatcagtgatgcaaaggaagggacacaaaagtagagttaagggagaccacactgacatttttaagtgatctaacatttaacatcaaaacaagcttctttcagtggagaataaggtcacaagattcaaagcaacaaacaagccaaatgctgagattttatgttcttacaaatcacataattgcaaaaccccacctaacaataatacaagggtgtgaaaaacctggtaacatgaagtaaacatatactttgtttagttagtgatggctttcttacctatttcatccacgacttgaatcatcttttctagttcttctggacagacatcagggcaatgagtgaagccaaaataaatcaataaccactgacccaagtagtccttgtcagttttacgctccccagtatgagttgtgagggaaaacggtcccccaagtaaaggcttgccgatgtgtcgctgccgttccttctctaactcttaaggagacaaaaacatatcgacaccaaaaaaaaagtcaatttaaccagaggtactcaaatacctgacatatggcccgtactatgctactcatggtgggggcacaaaatgtggaaaaaacagtttcagttttcaagaagctaaaaaaatcttttcagaaaaataagcacaaaacattaaaacaaaatcaaatgaaatgctatggtatgttgtaaaaaaggaaaaaatatttcttctttttcaggaacaattcagtcctaagccattagctgtgtccatgctgggggcagggaggggctgcagtggcctagagctgaatgtctaaacaagtggggtgcggtgggtggcctggcatagggagtctgatcctgagggtgctaaggagggcagctgggtggggaggtgatagtggtgacgggaccttagttacacacaggaaattgatgaaataaatgagtatattaaagagaagagagttacaataggaaacaagagtcaactatggagagaaagagagctaggctgaaccctgcagtactgcaaatacactgcaggtactagtgtgaacttctatctatatagatataaataaatatagatgtacataaatatatctattttctcaccatgtccactgagaggaccagggagcagacacactccaagaaccatgagcccagaacctgacttctaaatatcattcttcactaaaaggaaacagctttttggagaaatggctgataccagggttgcggcaaagaaagtgtaaaatgaggctggaacctcttgttgtggcagaaggaaagcagaacttagagaatattggagacgtgtcaaagacacagaagcctgctccaagggggctcccgctgatcaatctgggacaacttgggcatcaaaataaagagaatatggatttaaactgaatgaatatataggaaacaagtccacagatataaataaatgaatacattgatagtgggatggggaacagaatatgtaagtatacgtatgtcaatacaaatcatgaaacaccattaattacatgagtaacttttcagtagaaaacctgttagacacacattaatcaagtgatcaaactggacattatcagtaatgggacaactggtactatgtggtatctgaccagatgcacggagaatacagcatcacttttgtgatattcctgccaaaggtacacaacccgaatgacctgaatgaggaaacatcagacaaatccaagctaaggggcattctacaaaataactctcctgtaactgtcaaagctgtcaaggttgtgggagtcagttaaagcctgggaaactgttacagatgaaggaggctaaggtaaacaactagatacaaggtggtatggttctgaaacagatccttttgctctgaaagacatcaagtggcaaaacttggaagactgaactgtaatccagcctgggcaacaggagtgaaactctgtctcaaaaaacaaacaaataaacaataccctgaagattatctgaacactgaacagcagcaaaattatcagcgtcaattttctaattttgatggttgtattgtggttatgctagaaaaggtccttgtttgtaggaaatacaccaaaaagtgtttggagctaatgacgcaacatgtcagcaaataaatactctcaaattatttaggaagacttttcagattatttaataatacattttttaaataaaacaaacgttagaattgcacttgaaattccaaactaaagtcaaaaaaagcttccatattctagaattttcccgccacaactttcctagcttttgtttctttgtgaaactaaagaaacttactgcttattagactatgaaaatcttacccaatactacttattatgccaaagagtctcatatatatgtatgtcagtacaaaacttaacactgctaagttcctaaagcctatgaattcccagatttaatcattaacctttgtatataatgttatcaaaagagactccaaagaatggaaagatttaagcaatactttaaagatttacctaaaacctctaaaccaaatcttaaaagtcctaggatattcactaaaatgcaaagttcttataaataatttctaaatatttcaagatgctaatccagagcagttcctggcatttcctgaccaggctcttttcacctccccctcatccacagagggcatgcagtatctactcgcactatgctccttgcctgatctctaggaagccttctcaaatctcaaggctgggacttgcttttgctctcacaacatggtaagcttccttctggcctggcagaatcgcatctagtaaaatactttacttctgtgtctgtttcccttccgtgtgcacctcaaaggctcgactacatcttactcatcttcgtaccctccagatttcatcttgcccagtcaaatctatccacagtatatcttttaacattgttatgcagtggtatcctagcttggatcctggaacaaataaaagacattgatagaaaaacaagtgaaatccaaatacaatctgtaatttaatagttgtgtgccatttaaaatttcttagtcatgaaaaatgtgtcatggttatacaagatgttaatattaggggaagctgggtgaaaggtatgtagaacctatgctatctttgcaattttttggtaaatctaaagttgtttcaaaacaaaaagctaaaaaacaacaaaaaaggtgctagtccatagccaggaagacctttatacagggctgagcagatgataatctacttactctctgccttttctttcttgacgtgcttcattccagccagtaaagctcctccaatagcaaatgtgattgctaaagacttccaggaaacaggctactggggcagggatttcaaacataaaaattctagtaagatgcaaacatttaaccatacaaacttattaaagtagtttttaatatacatacacacaggccatgatgttaaatgtgcaaaatgtttcagggatgagaaaatgctcaaagtttctgtggatgcagttaggtctgggatctgaactacaaaggcattcatctccaggggaaagttccctaagtcagttctcttcatgtaaataaaaaaaaaaaaaaaaaaaaaaaaaagctcaagtaccacgattgttactatgtgtgaccctagctccagtaatgactttaaaaccaattatggccgggcgcggtgggtcacgcctgtaatcccagcactttgggaggcggaggcgggtggatcacctgaggtcgggagtttgagaccagcatggccaacatggtgaaaccccatctccactgaaaatacaaaaattagccgggcgtggtagcggacccctctaaacccagctacacgggaggctgaggcaggagaatcgcttgaacccgggaggcggacgttgcagtgggccgagatagggccactgcactccagcctgggcaaaagagcaaaactccgtctcaaaacaaaaaccaaaatccaaaaacacacacacaaaaaacaattatctgcttatgctgatactgagataaatagaccaaacgaaatttgggaggttaacttaactctggcttccagaagtaacaatgccaaagtagaagaggaatctaaaagtggagcttcttgcaaattacacccattatttctttgtacccttattcaactccccaaatgaagatgatgttggccaactagactaggcctaactcattaaccttcccgtagctccaaaaacccacttctcttaccacagggtagtggctctcaagttatttctgggtcagaattagaactcgagagaaccccaagaaaaaggcagatccacacataactaagttccactttttgtttcaatttcaacgtatacatggaactctggatggggctcaagtgacaaattataaaagtcctctgacttctcaatcacggtaaactttaggttcatacccttaagaaaacctgaaacttaattttttttttttttttgatggaaacgctaacataaaatccaagtcggggcatccagccacgtggagagggtgtaaagtctcaagttctctgtggagaactgggactacccgcaaggcacgggaaatgtaggatgaaattccatgacccaggtaaggcgcgcaagctaaggacaactttaggggaggcggagtagtgtctgaggttacgaccaagtgggatgtggccgctgggctggccgacagccgcgacgagcaccagaagggttccaggtgtgcactcaccccgggcttcgaggggcgcgtggagtctccggggcccttctgcgaccacgggggtggcggcctcgcagtgctgaggggccgggttcccaggcaatagccagggcgccccgaggcacgccacgcctccgcttgccgcgcgcagaactgcctcagcaagactctcgcagtcccctcggctgggccccaaaactcgagtccgcgaggcaagaagcgccaaagttggccacccagaggccgcataactcgtccgggtactaggaccagcatcgccatgagcctcggagaccgggtctcctttgaccctccccgcgatttccggtagcgttccgcttcctccggaagtcggaaggagtcgctctgtccgtcccgctcgttggtggcgctgttacatagcccgtagtcagaggcctttcagcccaggggccggcgcacggtaggtagttccctgcggctggaggcgggtctggcgcgggctgggcggtgctgcggggccgcgggacagcggagcgccgggaagggggctgccttaggggtccaggtgcgcggctgggccgaggcaaggcggccccaagcgctgggggcccccgctttggtcgtgggcttcggtgaccacagctagctcctcgcgccggggacacccccacctcggaagagagaacacactgcctagagacccacgggactgggcagcccccataaccctaccttgtctggccgactttgtcaacctcgtcctgccggccaagaggaagtgccagaatgttgactcctttacatctttgaaatagaaaccgacccattgcgattgaaatagtctttaacttaaaaaaaattgctaattaggataatttgagtggttagggcggtctggaagaactttaaatgcccagcgcttctagttatttaacattataatgtaacctaattaataaagcatagcagtgtgtaaagaaatatagacagcatgatatcccatccgttaacttagtcttcctgggtcccagtttcttaaaatactctcacggactcccttgctccctacagtttcgttatttgaagtttgttatgggttcctcatctggaactgcttatgttccttgttaatgaggccaagagcattcgtaggtttttcgttctttgtgaaagtctaacttcatttcatctgcctttatttatatcttaatatccgcaatattaaccactccctccccgcccctacctcggtggttgctttacaaaatacagagaaataaaaaaaggaaaatcgtcctctaattatcttccttaactacagatcccgctcctgtgtggcttttttttcccccatgggaccgactctgagtaggagaaactcgtgctctgatgattgttggaccagagcatggttggtttgcttgttttctatgagttagccaaactagccaactgttctgttctctaacccagtaacggaacatagtgttacctgtgtttcttgattcgcggttggactagaattttcagaaatttctgccaaagttcttaaatgtttgttcagcacttcaagtcgttaatcaaactatttttttctatcttatagttgcctgtgggtaggatttttgctcttttatctttgtgtatttgtttgcccagggataattttttcttgtaattgacaaaaagacataaaagtaccttgtgtagtcaggcagatagcatacaaaattattgttcatctctgattgcccaattgtaggttacctgatcagccacccaaattaagattgaagtcagtgtttctacctgatctattaaattttatttgctaaagtgcttcttttagtagcaacttcttcatattaattttataatattaaataaaatgctatcattgaaaacagttcttggggccagatgtggtggctcacgcctgtaatcccatcactttgggaggctgaggtgagtgggtcactggagcctaggagtttgaagctgcagtgagctgtgatcgggccactgccttccagtctgggcaacaaagcaagactctgcctctaaaaaataaataaaataaatataaaatatagttcctggctcaaagtaggtgttttataactgcattttggatgaattgctagtaacacctgagcctgatggcaaggacccatgaaactttagtgccagaaggcgcctacagtgttatcccttatagaccttatcacttttattactgctgtgaaaccaccaaagtcaccaaatgaggtttatgttttgttttccaagttagatatttttcttttctttcttttttttttttttttttttttgagacaaagtctccctctgtcgcccaagctggagtgtgcagtggtgcgatctcagctcactgcaacctccgcctcctgggttcaagcgattctcttgcctcatcctcccgtgtagctgggactagaggtgcgtgccaccaggcctgtctaatttaaaaaatatatatatttttagtagagacagtgtttcaccatgttagctaggacggtctcgatttcctgacatcgtgatctgcccgcctcggcctcccaaagtgctaggattacaggcttgcgccaccacacccggccccaatttagatatttttcttgagagaagcagggcatggattagtatcatctgatattggttctatcaatagtgatcagattttgttcttgacataactttaggctggtttgactggggacagctaggccctaacttttgtgaacttcccagcaccctaatgtgtttacttcatttttgttccaggcccctgccccttgtgcctaactcctaaccacaaacatttcctgccccaacttaactttccttttggtatggtatctgcgtagaaaacatatgctgcacccttaggctaggagcctctgttacaatagtttctcctaacaaagtctctctttattaatctctagactttccctgctgcccccttcacctttgacaatagagtgaagaaatcatactcttttcagggtagagctacttcttttacaagttcattattgatgcttgaaggctttccacaaggaacttcagccttctgccaatcttaagtattggaaaagttttattagtatgatcttatagcaacttttcagtaattaagcatccttgggtatgggaggcctgaggcaggtggatcacttgagctcaggagcttgagaccagcctgggcaacatggcaaaaccctattagtatgatcttgtagtaacttttcagtaattaagcatccttgggtatgggaggcctgaggcaggtggatcacttgagctcaggagcttgagaccagcctgggcaacatggcaaaaccctatctctacaaaagaaaaaaaaaaaaaagccaaaaaaagtcaggtgtggtggtacatgcctgtagtcttagctaccagggaggctgaattaggaggatcacttgagcccaggaagtcgaggctacagtgagccatgatcgcaccactgcactccagcttgcgcagtagagccagaccctgtctcaggaaaaaaaaaaaaaaaaaaatctctcatgcctaaggtagttttctcaaaatactggctgcttatcctgtactatgacatgataggaattttgagagcaactcttgtaaacttttctacattattctcttctattaaaatgttgcagtagtttcagttatgaggctcattagacagattttcagatatataattttaaaattattttcttaacatgcgtatagtactttatggtttagagatttacagagtaatagtttactgtgatcataactcagttgaagctcacgataacctattgagggttattttgcttcaggaaacacgaggactataattcagttctgggtttttcatttcaaagggttcagcacttcataatacctctttaaaacttagacagcgtagcatgtaataaatggtgcaggcaaactttgaaaacaaagttcactaaaaacttgccattctcctttctattcaaaagcgaaatatttccttaggtcttctaatttttccagatttgattttctctaaagttttgaattttcttttttaaaaaaactttatgtatacttttttttttttgagatggagtctcgctctgttgcccaggctggagtgcagtggcgcgatctcggctcactgcaagctccgcctcccaggttcacaccattctcctgcctcagcctcctgagtagctgggactacaggcgcctgccaccacacccggctaatttttgtatttttagtagagatggggtttcaccatgttagccaggatggtctcgatctcctgacctcgtgatccgcccaccttggcctcccaaagtgctgggattacaggcgtgagccaccacgcctggcctatatgtacatttttaaacacacataaaagtagttagaataaacttcatgcacccatttctagcttccacaattatcctgtactcactgatttttttgtgtgtctgtatttgatggagggagggagctattttgaaaacatttcctgacattagaatgcttattaattctaagtttcctcactggaggtggctttgagtttttgatctctctgttcaccaggaccaatctttctgagctccccctacatgtccctgaaccaagaaaggaaaggctaaactcgccaggagagtcaattccctgaccacctggttctttttgcactgccgtactcacttctgatcctatctttccctgaatatgtttctgaaatctgaaatggccccaaatcagaaatttgagcaccaacatgaagctcaaaggaaatgttaattggagcattttggattttggattttcagatcaggaatgctcaactgttaagtatattccaaaatctgaaaaagtccgaaatctaaaacacttctggtcccaagcattttggataaggagatactaaccttatttttaaaagccatgtatattcaacactttggatctctctttttaccccagaacacatcgctgttttgaagtgtgtgccccttggtgcttctctccacattaactttccttaaaaattgccagttcttaggatagccttgagtttttctaaactgaacttgttccagtggaaggtgtatttgagaggattttggtatcaaatgacagaaaatcaatttgatttagctttaagcccaggagaatttatgtgctgacatgtgtaactaaatgaccagtgttctagcagggacaggtgaatttaggtattcaactaatgttttcagaaatctccatctttccatcattcagaattgtttctttctatgttggatttcttgtcagttcattttctccaaaaattgaagccttagtttatcagcgtttgtagtagtggcagtgcctgtcccagggctgatgcttattgtgacccaggttgagttacatgcctacccctaactggccagaggaaactgggtttttacgggccaggtctgggccatgtgtctgctatttcacttccccagccagtgaatggggttggaggtcagaccacaagaactgagagtggggaattggataaatgcctagagaaaaattgggtgctgtcaccttaagaacaggaaatgaatgctgggtaggcaaaaataacagctgtccactggagagaagatccaattcattgggactaaatcccctctaggagatccacaatacatattatcaccataaaggctctgagtttaaagataaaaacaagctcacttggcaggggataagatcacccccagaaatagttttctcttaagagttaatataactcttaatggttaatataaccttaatggttaatatcaccaaggttaatacaaccttggtgataatattcatgttatatacttgctaagttatcttctgatttgattcttctattaatctgaacttggaatcgcaaatatttgaaacctaacataaggctaaagatttttaaactgacttagatggatttttgtcctgtaattgtattgaagttacccacttttcaaatcagattacctctcatttatacaccctcatacatactgacttgatatctaatgagattttcaggtaggggctgcaggaagaaatgggcaaattaaaaaaaagtatgagaacaccatgtttaaggatttccatctctttctggtgctgttacctattttagggctagttatacccaaccagattaaggaagaaagtagctgaaactcataattaggtggattaaagagtgtatcattagtaacaacagttttaggatgaaaagaggcccctaattctcaaataagtcaaattgaagtcttatccttattccaattgtggagttgttcttttcatctcttataggagtactcttagagttgggattttacatgtccacagaggattaagtaggaactctgtagatatatttgtcaaatgactagagatggggagtctgaaagtaattttagaaagtcaaatgaatttttaggttttaaataattcagacaccacagcaacagtttattactatagtctttatgacaaaaatcgttgacaatttagaatcttggcctttgagttttgtttgaatcattagcgttctgggctcttttaagagattataatttacagtttaaacaatcgaataatagttttttcaagtttaaatcttgctctttttggccactgaggcagggcagagatcatttgtaagaagaaaagatttcatatttttggttttgattgtggggtagcttaatattcaagttaaaaagaaaaaaaaatcctggttcaaattaggatccagggctgggtgtggtgtctcttacctgtaatcccagctacttgggaggctgaggtggaaggattgcttgagcccaggagtccacgaccagcctgggcaacatagtgagaccctgtcaaaaacaaaaacaaaaaccacaaacaaagcaaattttaatcccagctattgaagaaccgggaaccactgctcacagaaatgataatagtcatgtcagttagtttttgtgctggatttttgttgttgtttaaaattattcctctcctttcatatctgcattgcctcccactcacctattcagatataaaatatgagaaactgggtgacctacccaccaaggaagagaaaagattcagcctgacacaaaataacccataacaggaaccttttacaaagtacatacagtgaatgaatgtaatacacagctttccaaaaaaaaaaaaaaaaaaaaacttgaagttttgatagaattatttggtgtttgtgggacaggggtatatgtgtgtgcgtgtgcatgtgtgtttaaaatgagtatttcttaaaaattagcaattattccagatttaaattgggctttattagcattagaatgtctatttattgataggatagtaccttttgtaaattgttactcttctgaaagagtttatcatctgttttacagaagagaaagcaagtgttttagagggttagtagtttagacctaagactgttgggctctaaagcccacgtactttttcctgtaccaagctgcctaatgaattaacctttaacattccctttatcattttcttaagtgaaattgggaaattaaaacgtttataatttagttatcgtctttttactttatttagaaacctgtttggaggttatggatgataaacccaatcctgaagccctaagtgacagttcagagcgtcttttctcctttggcgtcatcgcagatgttcaatttgcagacttagaagatggctttaatttccaaggaaccaggcggcgatactacagacatagtcttcttcacttacagggtgccattgaagactggaataatgaaagcagcatgccctgttgtgtccttcagcttggagatatcatcgatggatataatgcacagtataatgcatccaaaaagtccctagaacttgttatggacatgttcaagaggcttaaagttccagttcatcatacatggggaaaccatgaattctataacttcagtagagagtatttaacacactctaaacttaacactaagtttctagaagatcagattgtacatcatcctgagaccatgccttcagaagattattatgcttatcattttgtaccattccctaaattccggttcattttacttgatgcatatgacttgagtgtcttgggcgtggatcagtcttctccaaaatacgagcagtgtatgaagatattgagggagcacaatccaaatacggaactgaatagtcctcaaggtgaattattcctttgagctgagaatctaatagattgtctttaaattcttcagctaccttttattcagcaggaagatggacaattaaggtaaaagtatattgtcacttgttcagggtcaggatttctcacaagccttctcacatggattggttacagttgattcaagattgatttaacagatattttaaatgcctattttaggccaggcactttttctaggggtagatattccgagctgtaaacaatactaacaatattacttttttgatggatggaatggagggaacaaacacagtacgtgggcaagacagatgataaatgaaacagaaacaagattatttccacggtcgtaagtgctgccaaggaaatagagtatgatgttatagagtgttacggaaaaggattagggttgctattttagattaggtgattagggaaggtctctccaaggagaaagatatttaagctgagacctaaatgacaaggaggagtctcccttggaatgaatgggcatagggagttagcagactgagggaaaaacctgcaaaggcactaaatggagtaagacttgagcattgttgaagagcacaggaaagggccagtggggtacaaggtgattttagagtgtaaacggggccaagaatatgtagcggctgagtggacttaagaagtttgcatttttaatataatggaaagccagcgaagtaagcaggggactgtcaagagtgagatgcagtgtgatatatatatatatatttctctaaatgcttgtgatttcctattttaagttgattgttgctaatcagatattcctaaagaaaaaacaagtgtccctacattaactaaatttgaatgtccaaatgaggggaaaaatgacttgatggggctaacttactgaattcatttcaggactttctgagccccagtttgtccagtttaatggaggattcagccaagaacagctaaactggttgaatgaagtgctaacattctctgacacaaaccaagaaaaggtggtgattgtgagtaagtatttaatttatctgattacactaacattttagagattgggaaaagttaggcgttaaagcatactaacaatatttgtgtttcgatatcctctttctataaaatggacacttagtttaaaaatttctattgagaaaccacctgaatataagattaacatttaaggatgaaccaggaaaaggtaaataacagaaacatcttgccatatattggagcctgtgagttggccttttaggttcaaagtcgaatttcctcaaatgagatcagtttatgaagtaatttcttttttaaacattaatattattattgaaatcattgtagattcacgtgcatttgtaagaaataattcagagcaatcacttatatgctttgctgtttcccccaacattaacattttgtaaaactttagtataatatcacaagcagaatattgacattaatacaaaaataaaaactccagaagtttggctttttctaagtttcttttgttttttgttttttgaaccttctctccataagagaagcaagaacccaaaggtgagatgacttcaccatgataactaagacataaaaattaccaagaaacttgactcaaaattaagaacaagctgaattcagcctggccaacatggtgaaaccctctctctactaaaaatacaaaaaagaaattagcagggcatggtggtgcgtgcctgtagttccagccacttgggaggctgaggcaggagagttgcgtgaaccgggaggtggaggttgcagtgagccaaggttgtgccactgcactccagcctgggtgacaaagcaagaccctatctcaaaaataaataaataaatacataaataaataaaaccaagcacaaacaaaaaacaccaagctgaattctaaagtgtggaatccaggttgcaatcagcttataaaggagcttgacaccacactaaacaatttgttagtggaagtcattaccagggcttggatcctttcctcaaggtagggaagccctgagtttcataaactctaatgaagtaatttctaagtgagaaattcagttaggggaccataccaaatctcagccttagagacctgcctatcagcaaagtggccaccaaacagaggccactgctgcccagatgcagcaaaactggtatcacagggcatgtgtgctacaggctcggctggcactgagcactgtgcaagctgtgcctcccacacagtcacaaggaagttagatttgtattttcatatagaatcatttttgatgggtacactgccatcagagattgtaggaatccaggggtgcttaaaacatacaagcgtgtatgtgcgcatgggcacgtgaaaacatacacggaactgaatttgggtttgcagcatggctgggagacttggtttggaggttgagattagaacccttggtttagagttagaattgatgtgggataacaggtgagaaggctagactgagagctggaaggacaggatgccattctggctctggtttatatgaactgtgtagtcctgggcaaatagcaaacctacaaactgcagtgttctcagtagtgtatctaatgaaattatgaatatgaaacccctggccaagcacggtgactcacgcccgtaatcccagcactttggaaggctgaggtgggcagatcatgaggtcaggagttcgagaccagcctagccaacatggtgaaaccccgtctctactaaaaatacaaaaattagccgggcgtggtggcaggcgcctgtaatcccagctactcgggaggctgaggcaggagaatcacctgaaaccagaaggcagaggttgcagtgagccaagatcaccccactgcactccagcctgggcaacaagagtgaaactccgtctcaaaaaaaaaaaaaaaaaaaaacctttgaaaatgataggctattcagatagttgattatataaaactatatttctatctgtaaaggtagtttttacttactaatcttccactgatgtggtaaaaacacgtagaaggagcagaagtgtttctgctaacactggaataccaggtgtcattcaagggttggaagagatgagtgcccttgggttgttggaatgatgtgacaccttttggctctataataagtggtctcagaaactaggatacttcttgacttgtgtctgcttttaagttttccactctcagcctgttctggagctgaaaggaagctagagtcatatagccaaacctttgaattttaaagataaggaaactgaagcccaaagagactgaattgcatagcagaatcatggagctgctgacagcactgagactagaatccatgctttatgtctccatcccctttcccatgtgatcctgtgttcttcccttttctttttactcatggcggtacacctatctaatttagcagtctcttacatttcttctaccatttgatgtaagcctagaaactggaaaagcaaacttttaaaaacggaatgattgaagttttctttagtaaagtttaaaagttaaagtgtaataaaaaaattttcttttgctttttaactttcattatggctactccaaggtcatcctataccttttgaattttggccgtgcagttggaaggatagaattgccattagctgagataggggacactgcaggatgagaagtgcgagtggagagggtagggcttcaggtttggaaatagaagtttcagatgcctactagacatcagtggagatgttgagtgggcagtttggacattagaagtctgaaattcagaatagagatttgggctagataataaacgtggaagttgaaagagtgtagatgacatttaaggcatgtaaatcactaagagatcaccagtgcattcagtataaatagagaagtccgaggaccaagcattcaggcactcctggtaagacgttggggaaatgagggggaaccagcataggagactggaaattagtggccattgaagttggggaaaaactagaaagacacccctgggagaaacagtggtgtcctggaatccaagtgtttcagggagaagggaacaactaatggcgtcaaatgctgcagggacttgatagatgagtcaatatggcttcgaggtgctggaaagcagcacacgcctttggacgcttagccctaaggtggtaatcagcacatgtatgcactttaaaaaaaaaattgtattacaaacagatattaaatagaagcatgtttaaattttggaataaaaatgaacggtaatagacaaaaagtgatttaatgggaagatgcaacgtgagctgtacttcagagtgagaaccgtggcttgatcatagatgtgttgctgtcagaaattagaacttctcctaactctacttccacgtatctcctgtggatgccagtataaatcttccctgttttaactcagtttttcatctgaaaagtgggtatggctaccttgatctcatgagtgtttaaagtcccataaatcagttcggaggcattgtttatgtcaatgacacataatccatggcccatgcctaaactgtttgtttatttatttatatttacatttttattttttgagatggagtctcgctttgtcacccaggctgaagtgtggtggtgtgatcttggctcactgcaacctccacctcccgggttcaagcagttcttctgcctcagcctcccgagtagctggaactacaggcacataccaccacgcctggctaatttttgtatttttagtagagacagggtttcaccatgttgtccaggctggtcttgaactcctgacctcaggtgatccggctgccttggcctcccaaagtgttgggattacaggcatgagccaccacacccagcctgttcttttatttagtgttacatcattctgtgtatataacattcatatttaaggaaatcaattggattggattccagcacagcatctgcccagtttcaggctgcctttgcagactgccctgcataggacacccttgatcttcctcggtgtttcggcaacttgagatgacgtaggcctcagagattcagggttttgcctctacagcagcctgtcgcgcctcatgtgaactgtcttacccttcttctatgctccagagatgtggctgtagatggcctagttttcttgtgtgtgaattctctctggtctcagttcatttgcataatgagatagcaatttttttttctttttctgagtactagcttttagccatttatttttatagaagagatatttcttaattggctcataactcttcttttctttaactaacaggccatcttcccatttacccggacgcctctgacaatgtgtgcctggcctggaactacagagatgccctggcagtcatttggtctcatgagtgtgtggtgtgtttctttgctggtcacacccatgatggtggctactctgaggatccttttggtgtataccacgtcaacctagaaggagttattgaaacagctccagacagccaagcctttggcacagttcatgtctatcctgacaaaatgatgttgaaagggagaggcagagttccagatagaattatgaattacaagaaagaaagagccttccattgttagtctaatttattttaacttgatagaaaatgagctttgtgtttgtccctcctaaacaaaaaaataaaaatcctctgtctcattgtttagtattcagcttgcataacaaaatgtatttatagtttcagtgtgtgatggttgataaaatactcagaaatgttattttggatcatgtatccattgtaagttagaaacaaaccagggaggaaactgaggcaggggtgtatagtcctcataaggggcatatagtcctcatgagggatcttatttggccctacctgattttttttaactttttacaaggagattgtattcacatgtgttaactatgtaacttcaagttcagcatataagctcaggtaagctttttctattcaccctgctgtgtaaatgagctttggacaatttctgctcagaacacctatacttggatttttataggcttgtattcccattttgtaaacaaaattaccaatagttatttcacgggtaagcgtgtggcactcccatccctgtaagaagggcctccagaaaagtcatgtagtcctcttgggattcataggaccaagtggcagtgcagccatgtgccacctggcctggtctgtttgggccaccagccattgctgtgtgaagctacagcaggtaaataaatttacactgactccctttatacactaatgggacatgtttaacaccgttttcatatatgctaaggcttatgtgtagaaacattagatggcaaatggggactattcaggtgtggagaaagtttgattcagggcctaaacaactataagaaataagcatgcctgttgaatacatgggcactatagggatataaaggagtgttagctttctatggctgctgtaacaaattcccacaaacctggcgacttaaaccaacatatacttgttctcttgcagttctggaggtcagaagtctgaaatcatttccacttggctgaaaccaaggtgttggcatggccatgctccctgaggagggtctaggacgaatccttttccagcctccagagctgtacttcttgcattctgtggctcatggccccttcttctgtcttcaaagccagcagtgtagcatcttcaaatctttctttactgtcgtatcatattctctgctgtctgtagtcagatctacttcagccttcgtcttgcaaggacacttgtggtaacattcagggcccaaccagataatccaggtaacccccatctcagggtgggttaatcacatctgcaaaatttattttgtgatataaggtaacatatatccagggattaggacatgtatctctctgagggccactgttcagctgaccacagaggtgactataatgtactcttgcactcatagaccttaccatgaattagacagacatccatgattcaagtgtgtgaaatttgctgtcacacaaagaaaggactgagggaacatggaggatgaatttaattttgttcgaagggattggggatgacatgcaaaatgaagaaaaatggcttgaataagtggggaagagtatatcaagtaaaatagcaaaagcagaggcattgaaggatatgccaaagtcagacatggcaagtcatgctgtgacgattcaccagaaaggtgccgggctgggagaagggggatgtggcaagaaatatggcagaaaaggacaggctggggccatattatggagagccttgaatgatgagccaagagttagaatttaacttgccagatagtgtggagcccttagggctttctgagctggggaatacgtgattagatttgtgtgaaatagagaaaaatggaagaaaaatgtgaaggtgtgaaagattttaataatagaggctgggtatggtggctcatgcctataatcccagcactttgggaggccgaggtgggtggatcaccttaggtcaggagttccagaccagcctggccaacatggtgaaaccccgtctctactaaaaatacaaaaattacctgggcatggtggcaggtgcctgtagttccagctacttgggaggctaaggcaggagaatcacttgaacccaggaggtggagattgtagtgaactgagatcgcgccattgcactccagcctgggggacagagcaagactccatctcaaaaaaaaaaaaaaaagattttaataatagaaatattaaatttaataataatacttaaattcaatttcattaatactcttcaaaagactattccaccaaaagtgccttttatatgcttaactgaagatgcgaaagagactatgaatagtcacataatttcgtagtctgatatgggagaggcatacatgatgaaagcacatcttgaacattactgtctttaagcacagaagtaaacatgacttggtcaatggatagagcccacagggaatttgcaaatgagtctgttttttttttgcatgtgacttcagtagtttattaatactaaaggagttataaaagccacaaatatgtaagcaaaatatacactggaaaactcaaatcctttatgtgtattttactgacccttaagtttcactttgactgttttaatatcaactagatttgttttccccctttttactcattcaagtcttaatcttagataatttctcaccattcagtggccactgtgccaataacaaaaacaaaatacacatacctcctttaacaaatatttatagaatatttactatagtaataaagacaataaaaatagacaaactaccagactcatttacactctcctaacctgtggaaggcactactcgttctttttgagtgaagtatttcccagatctctttcctagatcagaaaaaacagtatctgaccacagagtttgatgcttgtgtatgtaaaatgttgccatctagatacttaaatacaggactgtccaacagaaatgcaatgtaagccacgtaaataaaagtaaacagaaacagataaaatcaactttaatagtatatttaacccattatagccaaaatattgtttcaacatgtaatcaatacaaaaaatattttctgttctttttctaccatgtctttaaaatccagtgtattttacatttatagccccactcatttggacactaaattttcattggaaatactttatctgtatttaggtatcataaaatttgcaattggaaaattagattcaaatacccaagttgttccaaacacaattgtaagttttccaataatcaagtatccatttttaaatgaaaatggaaatgaaaaaaaaaaaagctctcctccctaggattactttggacatccatttataaagaatgtatatagattttgaccttatttctcatttagaatgtagttatagtccctattgccttcttgtttggtccctaattcctttattctatccagcttccctttctttccaagacatgcctgctcatttgattcatctagagttctcctttagttcactgcactatgccagctctggataagattagtttagggctggactgggcatggtggctcacacctgtaatcccagcactttgggaggccaaggtggacagatcgcttgaactcaggaattcaagaccagcctggacaacacggtgaaaccctgcctctacaaaaaatttaaaaaaatttagccgggcatggtggtgcacacttgtagtcgtagcttcttgggaggctgaggtaggaggatcacctgagccccgggaggtcaggactgcagtgagccatgatcatgccactgcactccagcctgggcaatagagtgggactgtcttaaaaaaaaaaaaagatcggggtatagccctctcttgaatgtctatttcagtatattacccaatccctgctcccctctattttaatcatgggcagccctccgtaatctttccaaacactttatatcttcagagtgttcttacattatctagattgatccttgttactgtgtaagtaagtagatctggcattaatcctattttatagataaatatccaccaggaggtttatatatttgcccaaattacatagttacaaagttaagttagaactcgtatttttaaacttctattctctagccttttccactacattatgacacaagaccctgcagaaagtcgtctggaaaatatcagaccatctcttacttgtcccatccaatcttacatcgaattatatgcacccttaaaaagttatttggagttttaaaactattagcccaaattacctgaaataaactcctggcttgttcccctaatgtttataaaaaattgattgaaaatattcattttaaaaacgaagttcttgaatttatttaaattactgtcttgcagtgagttggccaagaggaccgcatttccttgttaatatatatgtagacccatgagataaatgggaaaagtgtgattacaatggcaatagccaattgaattcttccaccaactggattcctataaagacacaaaaattattataaataaaaatcatggattgctttggaaacaagtataaagactgaattgataaaacacataattacattttagtatgttctcatctcagttgttttattgaaatataacattgatttatagaaattatttatatatatgctaaatataaatccttgtttatatgtgttacaaataccttgtcccatttgatgtcttttgaggaagagaagtcattgattaatttgacaatgttaaagttgatcttttcctaatgatttttgtgctgtttaagaatttccctcaccaaggttttgaaggtattctctagaagttttgttttgctttttttaaattttatcacatatttattaaagataatcatttatagtttataaaaatatactgccctgacacaaaatgttcttgataatggtaattaaaaactactcccacccccccatgtccacatcaatattcagtttagattggtttaatcttgaagtgtaatccagtaagactgaagaccaaacacttcagggtcctggacaggataataaaatactcataagccttctggatccttggattgactgacatcaataagggaaccaatttttgatgttgtaaaagaaatgtgttcatctccaataatgatttcaagctcctgccggccctctcggttgggaggaggccataacgcatcatcctctttggtaatttcactgtcatcaattatactcttcagttcctccatcatacttttatgtacataagcctcttttctgatcatgacatcattcttgtaattgctgtgttggcttatcttaatttcccgtccggtcagaactcaaactccagaaactcgtggctgaacttgcccttgtgccccacgtagtagcgcagataaaagtcactcttcatggcttgcaaaagacaactgagactgaacttctaaaagaaagctgcaccaccgcggtctgcacccaacactctgttttgcttttttataatagacctgtgatccccttggaattgatttttatgaaagttggaaagtaggggttgtttcacttttttccaaatggacattgaatttatcctagcctatttattgaaaagactgccttctcagctaccctgaagtaccatctttgccataagtcaaaaccctacatatgtatagatccgtttctaaattctattgttctatcattttatttattcatccttttgtcattatatgtttagccctccaattatttaggtcttcttcaatttctcccataatgtgttatagttttatgtgtagagattttgcatatctctgctagatttattcctacggagtggattttttgaatgtttttataaatgttaactttttgttttatcactttctgttacttcctgacagaaaagcagttaactcttgtatcctgatccagtgatcatacaaaattcacttattctagtaattttttagattcttttttattttctacacatgtattcatatcacccacaaatcatgaaaattttatttcttcttgtccaatcattgggcattttatttctttctcttgccttattttaccggctgggacaatagctgggacaatagctagcatggcattgagtacaagtggcaatatggccagcctcatctcattcctgatctcagagggaaagttttcaactgttcaccattaagtctcaggcttcagtgtagatatcttctatcaggttaagttccctcctacgcccattttctaagagcttttaacataaatggatgctgaattttatgaaatgctatttctgtatggctctagaagatagtttattctcttatttcattccattaatgtggtggaaaacattggttggtttttgtaatgtgaaactaactttgcattcctagaataaacccaacttggtagttgggttatatattgcaggatttgatttgctaatgtgttgtttaggagttttccatctgtggtcatgagtgagactgccatgtaatttcatttttttgtcatgttcttgtcaagttttggttacctgtcctcataaaattagttggaaagtgtttcttctttttctgttctctggaagtatttattgaaagttggtattatttttttccttaaatattatgtagacatctccagctatgccatctaggtctagagttttcctttaggaaaaatttaaattatgaactcgatttttttttttctttgagacggagtttctttcattcttgtcacccaggctggagtacagtgtgatgtcggctcatcgcaacctctgcctccagggttcaagcgattctcctgcctcagcctcccgagtagccaggattacaggtgcccgccaccatgcccagctaattttttgtatttttagtagagatggggtttcaccatgttagccagggtggtcttgaactcctgacctcaggtgatccgcccacctcagcctcccaaactgctgggattacaggtgtgagccacggcgcccggccctatgaactcaatttctttaatagttatgggactgttctgagtatttattcttatgtaaatgttggtaaactgtattttttcaagaaatttgtctaatttgtattttcaaatttattggtgtaaagttcttcatcatatccacttatgatttttacaatagttattatagtagtattctcttttttattcctgatatttgttatttgtacttccttgtgctcttttttcctttttgtcttgtcagggcttatcaatgttataaatcattttagagaatcaatatttgaccttgttaattctctatttttatgttgattttttatttcactgacttctgcttttatgtttattttcttgtttctttggggtttaacttgctgttcttttcctaacttcttgaaatgaaaaattcctaacttcctggaagcttaaaaaaaaaatgtacttatgtctatatgtttccctctaagcatgatttttagctgcatctcacacattttgatatgtagtattcaccttattcagttcaaaatattttctaatttccattgtgatttcttctttgacccaagtgttatttgaaagtatatttcctaacttccaaatacacaggaattgcctaattatctttttgttaatgatttctagcttaactgcaccgtggtcaaataacatactctgtaggatttcagtcctttaaaatttgttagtacttatttcatggccaaacatatagtctttttgtaaaatactcaatgtgcacttgaaaagaatgtgtatcctgccattcttggtttattgtgtggttaaaatcttttatattgttatttttcttttttgtgtttgtttgttagtaactgagagaggtgtgttagtctcccaagatgattgtggctttttccatttttcttcttagctctgtcaatttttgttctatttggaagctatgttattaggtccatacaaatttagcagttatatcttcttgatgaattgaatcttttgtcattaaaaagtgtcttcctttggcatcttgaatctactttctaataagtggtgttgagataaccagatagccacatagaaaaatatgaaattggacatgttcttcataacattacaccaggataaattctatctatctatttatttatttattcatttatttatttgagacggagtctctctctgtctcccaggctggagtgcagtggcgcgatctcggctcactgcaacctccacctcccggtttctcctgcctcagcctcccaagtagctgggactacaggcacccgccaccatgcccggctaatttttgtatttttagtagagacaggattgcaccatttggccaggctggtctcgaactcctggacttgtgatctgcccgcctcagcctcccaaagtgctgggattataggtgtgagccaccgcatccggcctacatcaggataaattctaaacagatcaaatatttaaatgtacaaatggaaccatacaggtattagaagaaaacttgggtaagttacattacaacctgagagagagaaggttttcctaactatgactccaaatccagaagcaataaggaaaaggactgataaatacaattacatgaaaaaacaacaacaaaagactttttcatggcaaagtatactttgcataagcaaagttaaaggaaaataacaaactgcaaagaaatactttcagcttacatcacagatagagcttctaaaaatagagaagaccagcaaccttagaatcaggttaaacctacattgctcagagatagaccaagatttttatagaaaaagaaatataaatggctctgaaccatatgaaaatgtgctcacttttgctcttaataagagaaatgcaagctaaaactacccctttctcaacgatccgattagtaaaaattcaagattttgataacatactctgctggcaaggctatggggaaacagacactgttagccatggctggttgggatgcaaaatggaagagccatctggaggggaattcgggagtatatagaaatatgaactatgcaattacactttgacccagtagtctcacttccaggaatttatctcaaagacacactggtaaaaatatgttagatatatgcatatggctattaactgcagcactatttttaatagcaaaagcctggatactatctaaatagtagagaactggttgattaagctatggagccatcagcagagtaagaaaagtttttctatactatagaatgatctccaggatgtagtaactggaaaagcaagtggaatacaactgtgtacaatacactgccagttaccttagataagcaggaatacaactaagtcacacatttgctccactgaaaaatcatggaaggataaactataaaactgaaaaaattttcccccatagggaaagggaagctatagggtcagggggctggagaagccgaatttcttttaatatatcttattttatagatttgacttttgagccatgtagatattttacataattataaaataatatcaatatattttcaatacaattagccctagaaataaatgaatctaactgtgtatttacttggtgggattagcatacagaacactatgcccagtaatttgagtgtacatcccttagtaggttatatcctaataacaaaaacaaacaagagaacctgttttcagtagtcatattatcatttggagattgcatttgtattgtagaataaatcaaatgggtgattatgttgaggtcactgagactagaaattttgccatgattaaaaggagatccagatataaaatgttcaataaggttaataagaactggtacctctgaatttgagtagttagtataaactcataagacatcttaactttaaatgtatatgtgtacgtgtatatatttatgtatgcatatacatttatgacatatatatgaattcacgaacattgcaaacactgttgattccaggtctgtggcctaaaacatgatcctgggtataacatgcgcctggaacatcttgtcataccagaaagcaaggaagctatcaaaggtttactagggtcatgtcagaaagaattcaggagcagacctgaataagtgccactggacaaaaatgggacagtctgagcatcaataaagacaataactgtcacggactgaaacacattaaatatgtttaaactggccgggtgcagtggctcacgcctgtaatcccagcactttgggaggctgaggcaggcagatcacttgaggtcaggagtttgagaccatcctggccaacatggtgaaaccccgtctctactaaaaacacaaaaattggatgtggtggcacctgcctgtaatcccaactacttgggaggctgacgcaggagaattgcttgaacccgggaggcagaggttgtagtaagccaagatcgcgccactgcacaccagcctgagcaacagagcaagactctgtctcaaaaaaaaaaaaaaagaaaaaaagaaaaaaaagaaaaaaaaaatagtttggcagtgtggcgtggataaggttcagataaaacaagattggacataccaataattgttgaaactgggtgatgagtatatctgattcaagatattagtctctctgcttttatatatgtttgaaaattcaaaataaaaagttaaaacaaaaaattaaaaatattcacaaaaagttgtttttctccaataattgtcttacattctactttgttgttaaaattgcaatattgtatttcatttggctggtgtttgtagttttttttcatcttttgactttaaatctttctatatcagtacagttaagggttgtctttttaagcagtgtagagctgggtttttctttctttttttttttttttgagatgcagtcctgctctatcgcgcaggctggagtgcaacagcactacctcagctcactgcaacctccgactcccgggttcaagcgattctcttgcctcagcctcccaagtagctgggattacaggtgaccaacaccacgcctggctaatttttttgtatttttagtagagacggggtttcgccatgttggccaggctggtctcgaactcctgacctcagttgatccgcctgcctcggcctcccaaagtgctgagattacaggtgtgagccacctcgcctggcctagagttgggtttttaatctttttacatactttgagattctttgactcttaactgaaatctttacctttacatttaatgtaatttctgatatatttgggtttaaatctatatcttaacacatgcttcctatttgtcctattgtttctgtttccccttccccttctcctgccttctgtactcattttaatgctaccagtggttaccctaatgattacaacattaatccttgacttatcaaagtttaatataaatggatacttttatctcttctcacacaattaaaggaccttagaatgcttaaactccatttactcttttccagcttttatgccactgttgtcatgtatttctatcctgtatatgtttaattagttaacattcatcgatatgtacacacgcacttatattgtctttgctcttcattctttcgtgaatctctaagtttcctcctgagatcatttcccttcaccctgaagaacaccctttaggctgacaactgcccatgactatactgggccttgtagaaaactacggtttttgtggacaagagtgaccaggatactttaaatcaactattattaacttcccttaagaaaagggaagatttctttcaaaagattcctgtttttacttgtatggcagtattttcacttactacctgattttgtcagcctcgaagatgtgatttcttttttttttttttttgagagagtgttgctctgtcgcccaggctggagtgcagtggcacagtcttggctcactgcaacctctgtctcccgggttcaagcgattcccctgcctcagcctcccaagtagctgggactacaggcgcgtgccaccacacagggctaattttctgtattttagtagagacagggtttgaccatattggccaggatggtcttgatctcctgacctcgtgatctgcccgcctcggcctcccaaagtgaagatgtgatgagttgaatacttactttgaggaactgtggcacaggataatccatgctgtaataatcaccagaccagacagctccctataaaagggtgtacatttcagattttggaagtggctacaagtgagatgcatatcatcacattctctccatgaccacctgatagcgcattctgattgagtgactgactctccctcaagatctatggcatcgatggaatattttcaaatctgaccatgattcataaattacttttttcagagaatttaaagcctcatatgaaaatacatttcatcttaaaaggcaggtatgagatccctgactatgccctgatttataagtggatccccccaaaatgaaatgaatattttataaaatccacagatacatcacttttttcaggtcgctagaagaaacagtgcaactaagaaaatcccagatttgatcagtcaatacttttacatttttaaagaggcttcagtgtgaggcagaatgagcccaaaccaatacatgatctgtgtatatactacaagagattgggtcacttcctaggggagaggaatgatttgtagtacaaatcagactaataatttgggggtgggtatatgcttctataaatatgtattatatgcacatatcttttacatagaataaaaaacaatcacttcagccataataccactagaagccccaggctgagttcactataacccatgggcttcatgctggaagtgattcaacccatttggtctacattcttatctacagacccaacctatagtttggctctccagtgttctaaagattgggggttataacaaagaaacaccttttcagtgatgtttaacttacaggtctatgaattttgttgttggcagatggcagtaggagtagaaaagaaacaaaaggacctattaataagtcctcagagacaagggtgggaggaagcaaaggaagaggtgataaaataggagcaagtggtcatgacaaggaaatgacacaagacataccagggcaagtctaacaggttgacttaaagtactgatcttttggctgggtgcggtggctcatgcctgtaatcccagcactttgagaggccaaggaaggcggatcacgaggtcaggagttcaagaccaggctgaccaacgtgataaaactctgtatctactaaaaatacaaaaattagctggccgtggtggcacgcacctgtaatcccagctactcaggaggctgaggcagaagaatagcttgaacctgggagacggaagttgtagtgagcagagatcgcgccactgcactccagcctgggtgacagagcaagactccgtttcaaaaaaaaaaaaaaaaggactgacctctgagatggctgctcatacttgtagataagattctggcttaaaccagaactgaatttgaggctgacagagttatcaccatattagatcggactgagtattactgtatcataccgttgctagttacaagggggccaaagtccaacggcctgacagtaatataatgtaatatgtagtgactgccactagcagtgataatgaagcctgatagatggggctgggtttgaatcctggctccattatttcctcagtttcatcaggttataaagaagataataccttgcctcctccacagggtacactgggggaattcagttatcattgtgcacagatgaggtgttgcaaacacgattccttagttctatcccacagttctatccctccacagggtaaccgtcaccgctcacctgccttcttcctcatgtaagatgttctgttgtgtacgatgcaagaggtaggacgccaagccaacagcccacaccgtacaaaagagtatgtgtattgcagagatacttttccaaataacattacctaaaaatagatgttctgatgttgttaaccacggaatcacagcccacagaaaaaaaaaatgatctttttgtatgttttgccatagtctgctttcagaaaagacattcagactccctcagccccatcgcccctttttgttttaggacaacacagaggtcacagcactaattataaacttcagtggccatttcttgtttgggttgttcagcagctccccttcctaggatgattacccttattttctctggggatccaccatgtccacactcacagtccatgtttcccagtgaactggactttggctaggtcaatcaatacatgttatctcctcagccacagtgatttggatcagcacaaacggacaagcaatcagagccagcaactgcattctgagactttggtagagtgaagaaacacagtccatattccactggacgtggcatcgtgaagatgtgaatggggggctgcagggccactgtgtggagcccaagagtgaagttagcatgacagatggtggaactgagaggtggagagaaggtaaagttccgagtccaccagtctgaagccagcaccacccttcaccttttcagtaaactgtaccaataccttttcttctcagctcatagcacatttgagttattttctagcttgtatctaaaggagccctaactgatctaccttaaagatgcagacggagttctagctgcctatacaaggagcccaggcatctagggaactagaattttccccactaaggtgggactcattagtctttattctaaggcccctgagaacattcgagccccactaggagaaactgttttaaagaaagtgaagaagaatctgtcctctcacttctataaaacagaagacgctgttttatagcagatccttctgacgttttcctgaagatgggtaaggatgattagaattagccccttttattatcagaaatgagaagaaaggcctagagagccccgttttactcctgggagttgggcagatagaccctcattattatgaggaaatctgatttgctgtctctccatttagaatgcaaggcttatacctgtgacttcagggttaagtccaacaagcagggtcagtactgcagggattgtgtacaccacctgttagcaaaaagggaggaaattacatgagttaagatgtatgcccaatatatgagatgttcagagatacaggaagtaaagaaagatgagatcagtggctgctgtgccccatgatttgcctctaagtttcaatggtgattgagaaagtggtagattctccttttgtggcacttagcacgtctgcctgcaattttatctaccttcctcctagactataggctattccagaagctcatttatctttgagctctaacactgagcacagggttttggtcttaagacacactaactttccagtcgctcccaagcaactttcatgcccaaatggcctttccccacttgcataaaagaaaatgttctttgaaaagtagggcaggagcagccacgatgctagatggccctgctggctttggacccaatggaccatccaggccagtactgcatctctgtgagaccacagaaagttttctaataatgcatacacaatcagctgtgcccagtaataaggtcaggctcttcattttggaactgctgataagtgtttggaaatgagaagactagccctaaagaggccctattcctaagccttgttcataacaagcaggctctagccaaacttactattgtgtgtgttgttggcagggaataagtagggagggtgggtttataagaaggatggggactttccaaacaatgtagctgtctaatcacatcaatttctgtgcttatatcagaagatgttaaggcaggtgccaggggtccatgtgggaggtagtggagggctgaactgtgaatgagggaggatgtctatggggacatggggtctattcctcctattatatcgtctgagcatgaatgaaaggtaaaatgtgcaggtactatagagataagcaattagacctcgattgtttaattaattttttggagatggggggggtctcgctatgttgcacaggctggcctcgaactcctgggctcaagtgagcctcctgcctcagcctcttgagtaactgggactacggatgcctgccaccatgcccgactcaaatttattttgtgttttgaggggctctccaaggcagtggtaaggaacagagagatgataaagatgactgagattctgaacaagaatgactcagagaatgattctgctgataacagaaatgggtgagtcaggataagtagattttggagggaaagatgctaggtaggtccttgggcatatctgaggagcagtgtgacatgcaggtgaatatacgcagcagtcttttggaaattcaccattaagctggatgtctgagacttgtctgcagggaaataatatttggaattcaagatacggaccagggtgccaaggcaaaggcagtttgatttgattcagaggcatactgatctggatagtaaatatcagaatgtggttttactgcactaaaaaaacaaaacctggatagaatttcatgttataattccagataccatcatccttgttgctcctctgtcaatattattctaaagcttaagagtcatctccttggtgtactgtacagtcttgtgtatctatattgagagaaactgggcaaaattcagatattttggaagataaaagatatttagagccgggcgcggtgactcatgtctgtaatcccagcactttgggaggctgaggcaggtggatcacctgaggtcgagagttcaagaccagcttgaccaacatggagaaaccctgtctctactaaaaatacaaaattagctgggtgtggtggcgcatgcctgtaatcccagttacttgggacactgaggcagaagaatcactcaaacctgggaggtagaggttgcggtgagcctagattgcgccattgcactccagcctgggcaacaagagcaaaactccgtctcaaaaagaaaaaaaaaaaaagatatttagaagatgtatggaacaatggccccctcctccaaatggttcaaatcagagccttgcttatatgaagactgtaggttttacaggatttaatacttttctttgctttttttttttcttttttttctttgcttttttttttttgagatggagtctcactctgtcgcccagactggagtgcagtggcacgatctcagcacactgcaacttctgcctcctgggttccagcgagtctcctgcttcagcttccctagtagctggggactacaggcgcatgccaccacgcctggctaatttttgtattttttggtggagacggggtttcaccatgttgctcaggctgatctagaactcctgacctcaagtgatccacccgccttggcctcccagagtgctgagattgcaggcgtgagccaccttgcccagccaggagttaatactttctagaaatataagtcactgaattagcagaacctcagaacttaagcctgttattttccggtcaaaggtttgcattgagtgtctggctagaaactcataaggaattgttcaactgatcttgagaggcctactctaggtcctcaagaaagtcctcagttgggccatctaaccaaagggaatactgcagaaagacctgtttccagaaagttcgaaattcacacacacattacattagaactctgatcctgcctattaatattttaggaaaaagcgcttcccaagggtttgatttttaagtttctcagaaaattaagcagggaggaggggtaaagacataaaaccgtgtgttttgtgccgttccccaattcttccaaacggaggaaagcctggaagcggctcatactcaccacccacacctctgcatctgggtcatttacctggaacgccagaataccaaggtgttagcagacatcctgtgctgttccattccttttaaattcatttaagcacattttttattaatttgttaagtgccagacactgcaataggcatcgagggtacaaaatctgaacaggatatagtccagatgaggacgggtgaaggggtttctggctgacacaacagatgtttttaacaggcagccacacatttttgaaaagccttcacgggagctctggagaggactcgccaacccagaacgggtattttaagggccctccacccccaccagtctcaagaaatgagggaaatgattatgaagggggtccccaagccgactaaaaagtttaatgatgctataaagggttttggtcggcttcgtctcctaggccctgagatatgttcagtgtcgtccgcgggccggacgttaacgcaggagccagggccgcttcttctgaggtcccctgggaagttccacgcgcggaaccagccccttccagggtgtgagccctggtatgggactcgcttccatgaacacatccgcgtctcttagacgggggagaaagtgggggctccccaagcagaaagcccaagtcccgtcctccccactaactgtgcgcccctgcgactctgcccgctagtcagttacacggcccgctaggccagggggcggagctgggagccgggcgggtccccctcccaccgcggccgcctgacctgcaccaaggccgccagcgcgaagaaggcggccatgagtccgttgcaggcccgccacagcgctggcgccatggctcggagaacacggcgcggggcggtgagtcctgccacgtgcggggcggtgagtcctgccacgtacggtccgccttcctccttgcgcggagggaccgagacccccgcctcggtttcggtgccttggggacactgccgtggccgtcgctccgcccgggggcggggagcgaagggcgtgggtgtagcccccactcagcgacccattcagcccgccccgaacgccgcggggtgtaggcggcgccgtcctggtttcgcggatgggaaagcgagtccctcagggagcgcaggtctcggtggtggacggaagtcgaatttgaacccgtataggttcaactccaaaccctgttttcactaaagctaccttcctcacaaaaaaaaaaaaaaagaagaaagaaaaaaaagaaggaaaaaaggaaggaaggcaggcgggaggggagagaggaagaaagagaaagaaagaaaaagaaagaaggaaagaaagggctgggcgcagtggctcacgcctgtaatcccagcactgtgggaggccgaggtgggcggatcacctgaggtcaggagttcgaaagcagcctggccaacatggtgaaaccccgtatctctactaaaaatacgaaaaaattagtcgggcgtggtggcgggagcctgtaatcccagctactcaggaggctgaggcaggagaattgcttgaacccgggcggcggaggttgcagtgagcccagattgtgccactgcactccagcctgggcaacaaagcgagactcctcaaaaaaaaaaggataaaaattgtttttacaaaaataagaaagagaaagaaaaagagatgtgtgtgtgtgtgtgtgtgtgtgtgtgtgtgtgtgtgtgtgtgttctgtttagtatttatgcatttccttccaaagctcaggaactttcaaatccctgtaagcattatggtaatttctagagtgacgacagttatattaacatcttatacggctcacagcttttcggcagacaggctcatttatcttcatgggcttttattataaaagatatttacatattatacatatttacaattctctcccaccaccaaaaccaacaaaatttccaaaattgctcatgaatttcttatgaaccgaagacactgaaatattcactgttctcccctagtctgtctggtctttttctgttttgtaattcgcccttctgcttagttcctccccgggctcatttacacatccataggcctcatttctgctgttctaaagagtctttatcgcttcaaatcaggagcttctgtgcctgtcctcttttcctttgagctaaatctcctaaaactgtctagttttttttttctttccctctcagtttcattcttttcacgaaacacttatttcaagaacgttgtctgctctgtgcctggtgctgggaccgtgaaggtcccgtgccgggactaggcagggagcctggcggctggcgggggtgggcacccgtgtttgcagaggtggggtggggacagcggggaccagcactgggtggagttccacagctaaatcagccctgggattggaaacaagcgaagactattctcactgtgcttttccttacataaaagaaaaaaatgagagcgagagtgctaggggctgacttgcattccccctgcacccccaattcatatgctgaagccctaacccccagtgcctcaaaatgggactgcatttgcagacagggacttgacagagatgattaagttaaaatgaggttatagggtggaccctaatccaatatgactagtgtcctgatacgaagaggggacagttacagagggaagaccacatgggcacacagggagaagacggccgtctgcaagccaaggggagaggcctcatgagaaaccaaccctaccaacatcctgaatttggacttccagcctccagaactgtgagaaaataaatttccgttgtttaagccacctagactgtggtactttgttgggacagtcctagcaaattaatacagggaatgattataatacccacaaggaaacaatggcatggaagtgcttttaagctcttgaatgccatacaaccaccatgaagttttatagttttcactgttgtctgggactttctttttttatttctatttttttgagacaaagtcttgctctgttgcccaggctggagtgcagtggcacgatctcagctcactgcaacctctgcctcctgggttcaagtgattctcctgcctcagcctccagagtagctgggactacaggcgcccaccaccatgctgggctaatttttgtattttttttagtagagatggagtttcaccatattggccaggctggtctcgaattcctgacctcatgatctgcctgcctcggcctcccacagtgctgggattacaggcatgagccactgcacccggctgggactttcaaagtcaccttagtgagcgtctgttggttttgcctttgcagggttcagtcccctttcttcgaggatcagtgtctttagtactgtggattaccacatgcactatgggtggatgtggactacagggttgaccgtgctcccctccttttggggataggcaggtgactttggcctgccagctgacatatcccattctgttgaccactgtgattgggtctaggatgggtataggatccaaattgcccagattcaatcctaggacctatatgggacttaggttgtcagtaaaggacaacctcagttgaactgaattttggatcatcaatgatgtgttccaaatatttgctaaatctggcaatcctactcacactattaaagagaagctttctttgtgatgaatgtgtagagctggtagaatgtgagcctggagctgtcaggagaaagcctcacagggagaaaggctttctgcaggtgaagtttaaaagcctggatccagccatgcctgaaaatggaagaatctcacaaccaacagagtctcttctttacataagcccgtgtgaattgggtttttgtaatttgcaacaaagaatgatgacttgtaaagtcatgattcaatagttaaggcaatgtgtgaaatccttgcaaacctcctgctataggtttgtccaggctttgcagagacacggaagagaaggcttagtctgaaaagtaatgaaaaatacgtttaaatgaatccaatatctcagacagctctgcttgaagagtaatttcatttccctttttagcaaaaggctatgatacaatactgcagagaagatgaggttttaaaggcagtagggtcttgtcaaagctggcttccctctgcagaaagggcagcacaaaggacccttcatcctgctggacactccctggctgcccagtcagtgacagcatcataaaagcaattgagccacaggagtgaggtgagctggactcacttccccgctggaatccgagaatggctggacatctgccctctgagaacttggaaatagaggtgcttgcttattccctgagagtagggttgttaatccaatgctaagagttggagcagagacaggaagctcatataaagacacaaatggcctcccagggtcacaggattgagagagagaaaatgaatgcatgaaagtacgtaaaagaagaatgtcagcaaaggaggattgatgggcttggaggcttcaagttaggtcatctgaaaggcaagcgtagaccaagtccatcctcacacagactggagagagtgctttgctccaccagatgtggacactcacatttcttggtcgggccaacctctttggggcttatgtgggttgaaaatttcacaggctcaaccctccccttgctgtgattccagaaggccaattttggagactttggcttcccacctagctggcctacagagtggagaacatgtggctctctgagccaggtgcatttcaaagtgtgtatcaatggaatgcccatgccattctcttttatagacttgttttccttttagtagtctccattatctgtccttccaggtgtggtcagctactccggaatgtggcaggggtggaggccggacaaagtctgaaacagggtcatcaccagtgagtggctcctgcctgtgctctatgtccagagtgtgtgtgtgctggtgatgctcccaaggtgacatattgggaacaaggattacaaggatcagaaactgctgcccatgccgtctacctccctctgtccagcacaccagatcagcaaaggccaagccatgctgtctccaggctctgctgattccatgtgaatgaagtgttggggcaggaaagggttggaacagaacagtggaggaattctactaggagcagtggacgaattctactaggagctagacagccttctgctaaaatatttgaaatcagaaaagcacctcgccacggcaaggattgatttgcttctacaaaacccatctagtctctatgaaggacttgggtttctactgttagcaaaatatagcccgtgttatgaaagtcttaaagcttacgcatattgatggacaatgaaaaacacttggcttgaataatgttcctcaaatatccccttatgccactgaaaggagaatatggttaaatgaaccctctgcgtgtatttatatccaccctattcattggcatgaaacactcagtgagccatttattctatccatttattctgtccatttattcaagacttcctacgtgtcaggcactatgctaataactgaggatgtgactgtgacctcacgggacacggtgtttgcccttgtagagcttacaggccaaacaataattacacgaataggtaggggttccagccaacaatggtggtgatgctgagaaggagaagtgaggctgctatgggaatgtgtgaaaccagagaatctgacctcttcccaggggttccagaaacctcctgaggaggtgattttcaggtgtgccctgaaagatgaatgggtgaggacaggtgaagactttatggaccagtgcttaaagccgagagagaagtgcttatgagaagaccaaatcctgaaggtcttcagggcctggcaaagaatgagagtacaagtagacatagatgaggctagcacaatgcaggtaaagagtttggttttatcctggctgggtgtggtggctcacgcttgtaatcccagcactttgggaggccgaggcagatggatcatctgaggtcaggagttcaagaccagcctgaccaacatggtgaaaccccatctctactaaaaatacaaaattagccaggcacagtggcgcatgcctatagtcccagctactcaggaggctgaggcaggagaatcacctgaacccaagaggcggaggttgcagtgagccgagatcacgccattgcactccagcctgggcaacagagtgaaactccatctcaaaaaaaaaaaaaaaagtttggttttatcccaagtgtgctgaagagcccctggagcactgagtggggagagcatgatgggaggtgtgcttgggctgccccgtggaggaggatgcactggggagagcccagagaagaagcagagactggccatgaggtgcttgcagtaggccaggagagagatgatgctggccagggctaacagggtagcagtggccatggagggaaagaagcacgaatgagtgacattggggagataaagtcaatcagactgtatgcagggaataaaaaaatgcctccactccttatgacaaagttaagttttcaaggctgggtgtggtggctcacacctgtaatcccagtactttgggtggtcaaagtgagaggatcacttgagcccaggagttcaagacatcctgggcaacagagcaagactccatctctacaaaaaaattttaaaaaattagctgggtatggtggcatgtgcctgtggtcatagcttcttgggaggctgaggcgggaggattgcttgagtccaggagctcgaggatgcagtgagctgtgatttgcaccactgcattccagcctgggtgacagagcaagaccccattgaaaaaaaaaaaggactttcaaaatcatacatggcagattacacaataaataaaaataattgatagaaagtacttaaaaaaacaagtttttgattctgcatggctgagaacagactgcagaaggtaggtgagctcttcaagggaatggcaaagcacttcccagtgttgcctttgctccgtccagaatcgctgagtgtcagcctgtgctagcacctacctggcctcaattagagtcgcctgatctccttaggtgggactgtggatgctcttctccttatactttcactttttttttccctttatggaaattcttagttttttttgggtgtgtgggtttttttgtttttttttttttgagacagagtttcgctcttgctgtccagcctggaatgcaatggcaggatcttggctcactgcaacctccacctcctgggttcaagcgattctcctgcctcagcctcccgagaagctgggattacaggcatgcgccaccacacccagctaatttttttgtatttttaatagagatggggtttctccatgttggtcaagctggtcttgaactcctaaccttaggtgatccgcccacctcggcctcccaaagtgctgggattacaggcgtgagccaccgcacttggctggaaattcttagttttaatctcgcaataattgttctgtgtgtatgtgtgttgttcatgctcctagactatgccacaaatttcagaaggtaaggactataacctgttaattttttcttctctccagtagcacctgacatacctggatataaacaatatccaaggtgagtggggatacaatgaaatgttgtaggaatattgggtttggtggtgggggatgtaataggtagcgtcttgaatttactgagttaggcagtattctaatcacttcatatatattaactcgtcttgtgcccacaacagatctattaggtagatagtactatcatccccattttatggatagagaaacaaaggcatacactagcttttaagtaccctggttaagcaataagtgagtcagaaattagacttcttcaagctcatggtgaggccttctgcaggtttatgaagggagtgagtgaagtgggctctctctcccatgagagtggagcatttaactcaacagctaccctgtttccatgaactggagagggtggaaggggtcatctgtagaccaggggctcaattctccaaaggctgaaggggtgatgtttgaggtcctcctttgatgccattcttcttatgtcttagctattttaaagaccaggaagattctccactcatgcccttgacttttagagccaattagatgaagctgtatttggaggtaggaagagaagttgagtgactttgaagccatcttctctctgatcttgactttctgattttggcctgggctgttggaattgtatgtgtccacaagatggcggacttctgctgggaatggagtcgtgcgggcatggaacgaaggaggggaggagggaagagtgggctgtgcctccccttggctctcccaggaagcctgtgatgtagacttctgggtgggtacgaggttggcatcagctggaggtgaagaagtgcaaacagagctttacacttgatcttaaccaataggcggagaagtgattcaaatagaactttgtaccaggaaatattcatccccaaacaagggtgttgcaagaaaagagctaagctttgctgtggtgctggcagagcttgaaactgccaccccagtactccaggaaattcagatatgcttgagaggagcaatcacttctaatgtaggcgtactctaaaagtaaatgatgataacaactatgaattgatgagtatttactgtaagcccagctacggccctttcacctcctgatatctgaaagccaccacaatttctgaatttttacgtgtaaactcatacccaccctcctatcccacaagacctgagcccctccggtttccctctctcacccattcaagtgctccttgttatcagttgcttagggctgccttagcaaattatcaccagcttgccttaaaagtaggggaatttattctttcacagttctgtaggccaggtacccaaagtcaaagtgtcagcaggactgcactccctctgagggctctggggtaaagtcctttcttgctttgacagcttccagtggctccttgtggccacatgactccaatctcttcacgttaccttctctgtgtctgtccttctgctcttcttttataaggcaatgtatcatcagattcaggacccacttggacaatgcaggatgtctcatcttgagatcctcaatgtaatgtttgcaaagacccttttgccaaataaggtcccattcacaggtcccaggggttaggatgtagacatctctttatgggagccaccatgatcattgtagaaacctggaagttattcctgacacctcatctttcctcctctctcagtccaccactgattctggtgaacttttctgctcagtagtcccccatttttattgctgacacctggtcccagcgatcagcatttcccctctttgaacacattaacctcctaactggcttcccaccctgttatggactgacttgtgctccccctgcactccctagttcataagttgagtatttggagatagggcctttaaggagataatgaaggccaatgagggagtaagggtcgggccctaatcccacagggctggtatccttacaggaagaggaagaggctccagagctggctctctcctggcccacacagaggaaaggccatgtgaggacacagggagaagagggcatttataagccgggaagagaggcctcaccggccaccaaccctgatggaaccttgatcttggacttacagccagcagagctatgaggaaatcaatgtttaagcatcatcctagtctgtagtgctctggcagcctgagcagaagaatacttactctgtgctccgtcccacccagtctccacactgcagccagtgactgtatgagacacaaatctccaatttctgcttaagaccctccctccctccctccctctcctccctccctcccttcctcccttcctctcctccctccctcccttcctctcctccctcccttcctctcctccctccctccttccctccttccctcccttcctcttctctcttccactctccttcccttcctctcctccttcccttcctctcctccttcccttcctctcctccttccctcccttcctctctccgttcctctgtccctccctttttctcctccttccctcccttcctttcctccctccctcccttcctctcctctcctctcttcctccccactcccttcctcccttcctctctcctcccctcacctcccttcccttcccttccccttccttccttccttccttccttccttccttccttccttcctccctcccttccttcctccctccctccctcgcttcctcccacagatggatccaaggcactcatctaagcactaaggatatagcagtgaacgaaacagacaactcccacctgatgttcttgtgtgaagcttaccttccagcacccctcactgcctatggctctggggttaaaaaccaacatttgaacctggtctgcaaagccctgcgtactcagagcactgcccagcctggtcagcctccacttgttccagctcaccttccttcttcaccacttcacgtgcacacacacacacacacacacacacccctggccctgtggttacacagcctcttcagtccttccaaagggcagtgcttctgccctccagagagctttcagacactgcatttccttctgtcgggaagggtcccgctttgcctactttgtcctctttccactcttagcctccttacgtaagcctgtcacaggctcttagcagctgtcacatctcccttgcagcactgaccacaatggccattaaataattaactgtacaattagttgtttagtgtctgtgtagcccacagaacaacaggcccatgagaacaatctctctctctgcttttggttcctgctaccttcccaggcttagcgggttgaactcggtgggttcttattaactattgctacaggaaagagccaaggaataaatgaattatttaaatcctaataagcccctcctatcctttagatatttttgttcccagtttatagatgtaaaagtaaggtgcaggtgcagggtggttaggtaactggcccaaggtcacccacttagtaacagtggagactgaagtagaaatccagagctttctgatttcaaagatcaggctctaaacagccacgactcaagcccagtttgctttaaatgatgatgagagaattcttaacagaaagtcagaagcatcctaactagaaattcatgaaagaataattttattttattaaaagaattattgcaatcaacaagagaatggataaacaaactgtgatataattacataatggaataccactagcaaaaaagagaaacagactactaacatgctgtcgcatccatgaattgcaaaaacatgctgaaccaaagaagccagacacagaagactacatgctgtgtgactctatgtgaaattccagaagaggcaaaaaccatggatgtgagagccattaggtcagtagttgcctttggggtgagacaaggagtgtctgggaaagagaataagggaattttctggggtgatgataatgttctgtatcttgatggagatttcagtaacctatttgtgtatgtatttgtccaaagtcagcatccatactcatgagatatgttaatttctctctttgcaaattatatctggaaaaccaaacaaactcttaaaccaatattgaactgtagtttgtgacatgcatgctgaagtgtttggggtgacgcgtactgacgtctgtagcttgcttagaaaataagatggatgctggtggacagagggaggaatgcatggacagacgcggggtaaagcgaggagagtaaaatggtacatgtagagtctagtggggggggggtgtgggtgttcactgctcaaaactttccaactttactgtatgtttgaaaattttcattataaaatgtcaaaaaaaagttcatgaccagcctggccaacgtggtgaaatcccgtctctactaaacatacaaaaattagttgggcgtggtggcaggtgcctgtaatcccagctacttgggaggctgaagcaggagaatcgcttgaatctggcgggcagaggttgcagtgagccgacatgaagccactgtactccagcctgggtgacagagtgagacttcatctcaaaaaaaaaaaaaatcagtcaaaaaaaaatacagtaagctgaaaaaatgcatttcaaaagcagctaatgtttatggtaatcagtaaacaatccaaagatgcatgctagaaaattattcaccgttttttattaaaggggatgattggcagggagaatgtggagaagaggcccaggagtggggttgggagatgcctaattcttggcaggatctggaagaagaggcagctggtgggatcttcttcagggtagagaggttacagaatacgagactgagcctttgagggcagccacctcctccctgaggcctctggggtggcagttagttctcaaagcttgtttcatttatggtccagcaccataagtgctgttgctgacattattggcttggcagtgaaatcaagcctgcgcccttgggggcggtgcgggggtcttgcccggatggtcgatgtgatggtgtcaatggcagaaggaggctggagacgtgggcactctaatctgatccccaacattcactggttatgtggccctgggtgcatcactgaacctcctctggcctctgttgccttatctgtaaaatgaagacaataatatttagcttgcagggctggtatcagaattacatattctgacattatcaaggtcagctgtgtgttgccaagtctgaggtcaagcctcagtcccctgttgctccctttatcagtggcttgtgacacagttgatcaggccctctgccttgaaacacttggtgctctctgccaggggacatcactctctcttaggtctctcttaacctcccgggctactcttcctcagcctcctttggtgaatccttctctggtgaatcctcctcttcgcccaaatcacaagttgggctaaccccggggcccagtcctcagccctcttttgggctctccttacaccctgccccatttcctatgcagtttctgttcaaacaggtccaaagccaaatcttggataccctgcccacaaccagctcctttctttgtaagtcttcttctctttctaaatggcaccatcagttctcccggttgctccagccacaatcttggaagcatctttgacctatttttctcctccatgcttaattcaacaacaaatctcattgcttccactttggaaacatatctgcaattgggcgactcctgtccaccctcatggttaggagcctaacccaaaccctaacacctcgtacctggactgtggcatctgctatctgctgcctaaccagtctctcagcttccactcttgtctccctaaaccctgttttcctcacagtaactagaattgtccttaatgcatagaatcatgactctccttcatctcaaagctctccaacagcttcagaataaaatccatgtccccaggatgctcccagggcctgtgacccctctggactcatgccctccttctgctcattctgctccatcactgctcacttcccagctacccctccaacacaccaatgcgcccccacctcacggcctctccctgcgccgtgccctccactggattgcccttcccttgatatctagaaggctgaatctcccaccgcttttagattcctgctcaaattgcacctcatcttttttttttctttataaattactctgtcttgggtatgtctttattagcagcttgaaaacggactaatacacctgtccaggctaccttcacagtgggttcacttatgaaacccatcgtcttacatccataataatggtttactctatttagtgtaaatgaggaagctatgtgataatagctggaatcttctgtctaagaggaagaaaagaaaccaaagtaaccatagcttatacagaagaaatgacagcacttaagagatgaagtccggaacaaagtctgggtattaagccatagaacatccttataggaacttggacctgtcacctgcagcaatttggtcacaactctgcatatgtaatgagcatgtaaataaattctcctttactcctggagaagatgttactgatctgctaccagctgaacacatgtttgtagtagggatgacaggttcaccggatctatctctccctaatctggtttcctttgtgaccggtcgcttgtctttctttgcaaggcagctggccagggttgtagaaattgcacctcatcttagagtctctctcgactcctctatctgaaattgcatgctatttcaatctcctcgttctgcttttttttttttttttttttttgctttccttgttgcttggcatggtgtatttacttgctcattaaaaagattatgtgtcttcctacttgaacgtgagccacgtgacaaaagggacttcacatatattccttattgctgtatccgcaacacctaggacagagcctggcgcccagtggtttgccaataaaggtttgtaggatggacgagtgagtaaaaaaaaaatggctcgcttagtgcctagcctagaaaatgcacccacaaaatgattattgtatcataataatggtcctttatggagaaaatgggccaaattagaggggaagaacttgattctgatcttaaagttagatcctgaatggaaaaatacttaatcccttgggcagtttcatcattagtatgaatcagaggttccttttctggcatggaagatagattgtcatttgatccagaaattactgcccagaactttcctggccaatagttctgttctcctgcctaaattccttcttcatctgactccagattccctgtttctgcctagggtgcattcattcctccctccctccctccctccctccttctcttccttccttccttccttcctccttctttctctttttctttctttttttctctttctttctttctttctttctttctttctttctttctttctttctttccttctttctttctttctttctttctttctttctttctgtctttctctctctctctctctttcttttttggaatcggggtcacactctgtcattcaggtttgagtgtagtgcttctgtcataactcactgcagcctcaacctcctgggctcaagtgatcctcctgcctcagcctcccaagcagctgggactacaggcacacaccgccatacccagctaatttttaaattttttgtagagatgaggttttgctatggggcctgcgtgcatttctttgaaatgaccctgagcatgctaccacccagtgattccacccctaaggcataaagctttccagtggctgcaatgcaagaccctgtcttaaaaaaaaaaaaaaaaaaaaaaaaagacagcgctgttacacatttcaacagagccgtttaaaagacatttatcagaattctgctgagcaggctttgaaattagttctgctcagatattggaacttcttatctccgcagacaaatagatacagccccgtgtactgtgggcaggaagtgggcctttgatctctgtggggagacctgctttatatatagcactttaaaaaatcgaattatgttctgtgtaagtttattttgaggacgtcatactctatggaaacaagtaggattcctttatcagaaaggagattgtaggttctacaatcacagaacaaatatacggtgcctgctctgctgatcatacagtgactgtttgatgaagttcaaatacttgatggaaaggagcaaaacagaggaggatattgatacacacacacacacacacacacacacacgcacacataggcatagattgtggggagagggaaagagagaaagggagagagacagggaggaggggagagagggaaagggggagaaggcgaggaaaagggtgggagggagagggagagagacaaaataactcttcaaatttgagagagatggaaaggattccagctgatgacagctacgggctttactgtattttacttctgcacctagttggtgagctaggagctaggggcagagtaagagttattatttccttccttttatttttctctttttagcttctagcctatctgggcagaaaataatctgtcaccagcctggcccaaccaacaagcagagccctgagatgggcagggagcatttggtcccctgtgagttgtaggaggttaccctgaaatctgagaggtgacatggcttaccaggatcccagagcgagtggagtggggaccccccctggaatcttacagttcagactctcaacccccctgcttctgtccacacatacacaggagattttcaaacaacgctccttgagagggaggagggaggtgccgaggcagctgtgactctcacgcccatctttaatcagagcggctccactcagacttaaaaaaaaatgttagttcatgtcttttactgactcatacacaattacttgtcttctggtttgttgaagcaatcagtcagacaacaatttgccacagtaatttcgctccaagtggctggccataaacactccagtgccacaatcatctgaagggcatttccaaagaaggcaagtaatttggccattctcatccattttctagtatttcaagtcagccagttaaccttctttctctcctgcttttcttcttgggagtggtgtaagatttcttcattttgttagcaccaccatgaagtcttaccacaggatgaagagtagactttttttgaaagttgtagtcagctgggcgcggtggctcacgcctgtaatcccagcactttgggaggccaaggcgggtggatcacgaggtcaggagttcgagaccagcctggccaagatggtggaacccagtctctactacaaataaaagaaaatcagccgggcgcggtggctcatgcctgtaatcccagcactttgggaggccgaggtgggggattgcttgagctcaggaattcaagatgagcctgggcaacatgatgaaaccctgtctctactaaaaatacaaaaatcagccaggcatggtggtgtgtgcctgtaatcccagctacttgggaggctgaggtgggagcatcacttgagcctagaaggtggaggtttcagtgagccaagattgtgccactgcattccaacctgggaacctgggtgacacagcaagactctctctgaagaaaggaaggaagggagggagggagggaggggaaagagagaaagaaaagaaagaagaaagaaagaaaggaagaaagaaagaaagaaagagtcaaagtacatccatctttttcttccagttgctttccagcaaagatccgcctttgctgatcaagaggaattcctttcttattctgggtcttggcctttacattttctgtcatatccaagggttcgaccttgaggatgacggtcttccccgtaaagatttttattaaaaaatctgtattttggtggcggttccactgcagatggcagattgaaaagccagaatattttctgcattcaggatcttgtagtaggttgacagaaaaaaaagaggtttgaaaatacaacaaagggaaggtacattagaaagggtagtccacactaaaagactgggaaaacctagtaactaagaacacagattctagaactggactccgtggattcaaatcccagctatgcctcatatgatttgcatttctttatctgtaaaatggatagatggaagcagctgtacctcctagggttgagagtgttacatgagtggatgtacgtgacacacttagaaaatgcactcagcaactgccttcttagcttttaactcgggggtgggaaacccaggttagattaagcagctgttgcgaattgctaatcaggggagaagtcaaaattcccttcaataactagttctgtcactccattctttaatattgatgcttggtcaaattaataaagacattttatttggttagcccctttggttggaatgaagaaaaaattactctggatagctcaagaaacaaattaaataggatagggaacatagtgattattataagcataatgatgggcaaaaagaggagacaaaaatctcagaacaggatgagaatgggttcttgaatgcgggaccccatgcgatgtggcttctgcaggtggaacagccacgtcccctttggtcttcagaagcaggagctggtggcttcttgctggaacagcccatcgtccactcattctcatgccccgttttgggacagtggggtgaccactttgttttaattgcttatgtaattgtctgcctttccctatgaggtgcagtcttagcgtgggcagcacccagccaggctcactactgcttgttggcagagcacctagcacatgacagtcactccacaaatggtagctggctagatggtgtatcaggtaggatatggggaggcttcctcgctccctctgctgctgcttctcttctgtgcccttctgcccatctcctgcccgcagcctctctgcctcttccgccgcactcccatactgctagtcatggtcagattcccaagagagagaacattgcaatgatctagctcctcttgctgctctcctcagtcactgattcattcttccatccacctgcctacgtgtccacccatctcttcgtattttgttgctactgagtatctgttttcctttcccttctccagttcctcccatggggctttggtgggatggaccccaccccagatctagccattgcactggccactggaatggcttcagagaaagtcgtgcaccccaatttaggctaatgagagaatagctggttcttatctggaccatgtggtgtaagaacaagatcttgtctgcctgggtgttctgggccaacccaaggagccacacaagataggatggagtgggagacaggtacagagagagagggaaaggttgattagatactggatgacatggtttgagttactggatcaagtctcatttgaagctagaactattcctgaacatccaagattttttagctattacattcctttagccagttttaattgggttgcttgcaacccaaaggatgctacctgacaggccatctagccagctatcatttgtggggtgactgccatgtgctaggtactctgccaacaagcagtagtgagcctggctgggtgctgcccacgctgaggctacgtctcataggaaaaggcagataattacgtaagcaattaaaacaaagtggtcactccattgtcccaaagcagagagtggatgattggattggctccattgttttaaagccagtctttacatatgtttatgtgtgcctatgcacaggaaaacattagagatgtgatctgttggcttattttacactttgctttatttttgcagtgaaccttaattactctaaaatcaaggggggaaatgctattagaatcaaaatgataagtatggtaagcattgtgctgggagaggtactggatgctgttaggagcacttagcagggactggctttaggcagctgcataactgcagggagcagtagagaaggttcagtgaggctcacttgtgcatagagaccttcctgcctctgcctgtataggcccacccttagcgaggccctgggggtatcggctggtcggagaagccaggcacaggagcctggagtccctggcctcttctccagactgtctggggcgttggctccctgatctggccgggagcatttccccagctcattcctctgccttacggtggagagctggttactggaagcacaaagccctttcctttcagggctccagaagctgaacattaagaaaccattgcaaatacagtaattgctcagaatgagcattaatgtcctattaaatagaggtggctgctgtggctggaatatctaattcagcagccatttcctgagaaccatgttaatgtgatttgagctaattacctcctctctgcctaagctcagtccagaaattactgaggcctctgcccttcagtctttggagaagcacaagaatccctcactccctttctcggcaggggagttccggaggttcaggcagcaagcaatcatcaatcaatcagcgattggccactctgtgcttgacattggactaggtgctgaggaggtggggacactcattaaatctcattctgtgcctttgaggcatttgacatttgtctaagaagtcaggacaaccgtggctaagaaatgaaagaattggagaacatacaggacagcatggactcttcattagttcagtcattcttggtggtagagggcacactggtggataacacagctctggtcccacagtcatgggagcttatgttctaatgagacagacattgactaagcaattgtgcagtagttgactaaccacaacagtaatatgcgtgatggattattacaggatgtcatgagagaataaaatgaggagtggggtggaaactgacctagcctttggggaagggggtctgaaaaagcctccaagggagtaggagacccgagagtgagcaggaatgagcagagcacaggagcgaaggggatctcttcacctccgcactgtttgcggagtatgggggctgggcacagagaggaaagggcagggtggtgcccggtaaagcagtactgtctctctgtcttgctgcctgcagcagcatgtcgtggtgcccagtgccaggaccttggagttgggagacctgggttccagtggcaccctagctttgtgtccccagaggagttactcatgtgttattgagaacacacggtacacacctgggtttcacctcctcaggggaaaacactggagattactaacttccagtgcgaaaatcccatgattatgtaaattctaggttctgagtcctgcagcaatgagatggaaccatcctgcaagggtctgtaggggttggaaggggaaagagtgtagggggccaagtcagactatggggtctgagggtataaagggtggttccattctgtgaccaggagcgagttctcttcctttctgggccctgcagctgcactgtcgcaagccctacaattgggcttctcttgcgcagccctcactcctgcagctgagttctagtccagctagaattccagtcatggagactacttgagttcttttcctggggcctcttgatccccttgtaaatcagagactgaggacagagacttgatggcaaagggaagggggtgagcagaggatctggacacaattccacctctggccttattagtaaggtgactggtagatgctgtgaaatgcacccagacccctcttcaggaatgaaggacttacttgcccagcttctgggagtgctgccagaggtggctttcagccgtccgccctggatcacctcacctgaaaaaaatagcccttcccaaagtcatgcctctttccaggggcagcctgtgatcagggactgatccaagccagggtataaaggcctggttccctctacacaacttgagataactccaaagggtcagctcagctccaaaattcctctcagggttgactgaaatcttcattaagacggcatcgcagctccatgtttcccatctcttcctggcagtcctgcacgcagagctttgtctcaggttctgcttctctgggaacccaacctgcaaccgtgctcttcgacaagccccttcagcgttttgtgcctcagtttcctcatttgtaaaatcgggataataatgaccacacttcaggctgttgaaaggatttaaaaaacaaattcctggtggtgggatcatttataagggtatttgcgtttcgtcatgacttggataatcttaccagcattgagtggcaatcaaaaatgtttccagatgtggccaaatgaccctggggaggagggggagtcagaatcacccctggtggagaattagtggttttaaaaagggagaggggggtgggcatggtggctcacttctgcagtcctaacactttgtgaggcagaggcaggaggatcacttgaggccaggagttcaagaccaccagcctgggcaacacagtgagaccccatctctacaaaaaattaaaaaattagctggacgtggtggctcatgcctatagtcccagctactagggaggccgaggtgggaggactgcttgaacccaggaggttaaggctacagtgaatcatgatcatcatgccactgcactgtggcctgggcaacagagcaagactctgtctcttaaaaaaatatttaaagaagaaaagggagcgggaaaaatcatttatccatttcccttggtgattacacatcaaggcacaaacaccactcaacacttcccagcctccctgaggctgcggcctggccatcactttcttcattagacaggactgagcacccactgctctctctccctggaggggagggactggcagccattgtttctttctaggagaacctgggcttctaatttcatcccgtgcgtaaactgtattgggcactggacaaagctctcagttagtacaagggatggtccaggtgagggctcatttgatcccatcacaaatccccgcagggtcctctcagcagcagggagcaggactgggcctctgacccccggtgactgtaggtcctcctttcctggatgctcagtgaggtggttccctggcaacagcacagcatcctagcagccccagggcacatgaaccacagacagagggcagatgagacaaaagagtcttccgtgctcactgtgggcattgtgtcagtgtttaccctgggaagctcctggatgtgctgttgacccttctctctggagaactttagcctggcccctgcccaccccactggagccattactcagagctctgtgctacaaaggcccagagaaaggaccctggggaggaggctacatggaggctacattcattcattcattcactgattcattcaataggtatactttgtatctctactgtgtctatctattgagcccatctctgggaatattaagttggttgagatatgggttgaatatgctgtgcaacagtggggaatttaaaacacagtccttgacctccagtagtttttgttttgttttgttttgagacagagtctcactcagttgcccaggctggagtgcagtggtacaatctcggctcactgcaacctccacctcccaggttcaagcgattctcctgcctcagcctccagagtagctgggattacggtcgcccgccaccaagcccagctaatttttgtatttttatagagatggcgtttcaccatgttggccaggctggtcttgaactcctgacctcaggtgatccgcccacgtcagcctcccaaagtgttgggattacaggcgtgagccactgcgcctggcctccagtagttttttattgggttgggagagccatccactcccaggaaagctaaggactaatatgaattttctgtaaagcagaagcacgcaggagaaatttccaggcacctgtgatggaggaggatgaagcaagggaggagcagcctttattgtgtgctcaggtgtgggagacccttagcacctgtacagcttgggaagaagaatgtggagctctgagaagtgaagaacatgccccaaatatattgcctgtgctgaagacaaagagggtttgatgacacgaggatttgccccccttttctgttaggaccacctggctgcctccaaacactctctgacttgcctcctagttgctcgcctcacgttttctcctcctccgcttttctagaaaatatgctctcttaagaaccaagtctgaagcgaaggctgtacttgaacttcgggctggctggaccactcagaccgattgaggtgctctatctccctaacacctgcactctaagaaccacataaaggactcgctggtttgcggctgggtggggttgggtggggctgggtgagggcgtgtgagtcagcttggataaagaaaatcatccaggagggatgtgttttgggacactgactactgacctcttttctgaccctctttgttccaggcaactgtgcagatcccggcactttggctgtttccaggagtctgtgcttttttccccaaggggctggccaggaagggctgcctgggagacagtggctgctcactgttgccatttttctctcccatgatctcaaagccacccattaagggaaccatcagctacttgggcaatttccttctgtgtagagagcgaatgacatttgcactatttgctcatctaacgcacccgacatgtcctcctttctggttaatttgggtcccaactagggagtcctgtactgacatcattcaggcagttgggggctctggccactgtatatctggcagcacaggtcccccactctcttggataactgcccagcccagttatccattgaggggatgcttcaaatggctgggaaagttcacagaaaaaggtgtgagccgtggtgaagcttgtctttattaaccagtgagcaaaaaacattttaattaaattgcaaagatacacatctttggttccctcttgaaatctagcagaaagtatgccagggaagaaaatttgcacagggagaatattcaaatcagaagtattttccagtttaaaatatcagcaggggcaggcaagggctggggagaagaacaggagtggttatcttggagtcccctgtgaagtccctcacgaagaaaagacttatacaagaattcttggctgggcacggtggctcacgcctgtaatctcagcactttgggaggccagggcgggcggatcatgaggtcaggagatcgagaccatcctggctaacatggtgaaaccccgtctctactaaacaaaatacaaaaaattagctgggcgtgatggcgggcgcctgtagtcccagctacttgggaggctgaggcaggagaatggcatgaacccaggaggcggagcttgcagtgtccgagatcaggccactgcactccagcctgggtgatagagtgagactccgtctcaaagaaagaaagaaaaaaaagaattctcacctcccagggttatgtctatttgaaacttagaataattgcctccgttggctgattttcctctgaaggagaaattataaaatttaagatggggaagggaggtgtggagaaggatgctggagatattctggctactgcagtaactggatggctatctgcttttctgcaggcccctaaggtaaaagccttgctccaagtccccttctgacttctagtcacttccgtgctgccagcagagggcgtgggattcttcctgaggagcctgagtctcagctttgccaggtccttgctgtgtgaccttgggtaagttacataacctctctgagcctcagttttctcagccataaaacagagacaatagtcagccctacatttcaggattgttgtgagaagtaaataagactatgcaaaaggcctttcttccccttcctcctcttccatctgggggccctgctcttcctttctcaagctgtccctcctcccagcatctttctgagtctgcgtgcactcagaaagctggctcctcttcctcatctaccggtaccctttggaacacctggggctacccttgctcacattgttatctcattacattctcatctcttacactggaaaactgaccacctgtataatccacatctgagcccagagccagcacatgggaggcctcttaatgttgaatgaaatcgctttgcaaaccgcaaagagcttccaacagccccttagctgtcatcatccagggaagcatttgtcatagcaaaacaacctacctcaccaaaaagtgaagcgtgcctgggtccagcctgtagagagaggctagggggaaggagtggatgcagagcccattttgtgccactggggagaggagtcccgaaaggccactgactgggaagcccaggcctctgcaagcccatgctgttcactccttggttggatataagtcaagatcctctgagccttcctccatcatctttctgctgtccaacaccgcagtatcactaagcccctcccctagctggataaaggagctctgctgggctcttcctgcctgccgcgggatctttgtgtctcgcgtctctgagatcttggtcccatcaccgacttgctctgtgattttgcaaaggtcacttagtttctctgagccttgattttcttatttataaaatggagtgcctcaggaatcaaaggaaatagagcgaatgtctcccctcttccctcagctacagctcaggcgctctccaccctggcagcccagaagaattacctgggagctttaagaacatctgaatgccgccctgcgggtctcccagtcgcctttctgactcagcggatcttcaatgagactagggcattggctactttttttaaagctccccaggtgattcatgggttgagtaggggctgagaaccattgtgggctgcttggccaacaacagggcccctctgtcctggctgttgtcactctgtctggcttcactccacctcccatcccgcaaccctgcctcttagaggctgctgaacatcttacagtttcccagagggctctctccctctctccctcactctccctccctccctctctccctttttctctctccctctctactccctcctcctctgtctctttctcttccttcttctctttttccccctcttccttttcctccctctctccctttctctcttcctctctatcctctcccccttcctctctttctccctccctttctcttcttctcgccctctcttttttcctttctccctccctctctcttacccttcctcctcctctctctccctctcccctttctccctctctttctccctttctctctcttcctctctaccctttttctttctctctctctccctttctctgtccccctcccccctccttttcctttcttccccctctttcccttcctctctctctctctctctctctctgtctctctctcgggtttccctgcctttctatatcaccttgttctccctacccagactgctgtcctctaggcttagctgagcccttctcatcctgggagcctcgcctgggccctgtgtctggggttggccccctccatgctcctccaccccacctgctgccaccttgagtcttctctctgtgtctcctaatagtcaatgtctcactgccctggaggcccctctgtggcttagaacctggcatatggtgggagttctgagtttgccagtcctgccttccttccctccctctccttcggcccccttggtctctttcagcagtgttctcaagctttagcaagcatcagagtcacctggaaggcctgtcaaaacacacattgctgggccccacccccagggtttcctattcagtgcaggggaggagtagatgatttgcaattctaacaatttcccagatgataatgacccactctgagagccactgctttagagaagggtgtttcaatccaggcactatggacatgctgggctggataattccttgttgtgtgccctgtcctgtgcactgtaggatgttgggcagcatccctggcctctacccaccagatgccagtagtaaccctcctccacatgccacaaccagaaatgtctccaaacctggccagatatctcctatgggggcaaaatcaccccaacattgagaaccactgctctagaactctttgtcctgggggtggagtggactctgtggggacttggcaaggccaagttctaaattactgtcctcaagccaaatcaggccagccacctgtttttataaataagggctcactggaacacacagccccacccattcattgtcatcttctttctgctgctttcttgctacaagggtggaactgagtagttgcgacagaggccatctggtctgcaaagtctgagacattcactatctggctcttttcagaaaaagtctaccgacccctttcagaccctgaaggggtctggtagaatgtgatgtggtagaaggaccggggcaggtgggcccacccactctcttccatccaaaggaagggtagtcctccaggctgaagctaaataaagggcgtcttctatccccaggagtttcctatgctgggaagggggttgggggtggcattgggcccggcagcctggggccaggctgggattttccaccactgcctggttcacggccatgtggtcacctccctttgaccagacctgggctctgcttatctacagggtaaacaagagctccgcacacagccccagggagaaggaaccaagcgggtagattctgaggcagagtggaagtgtacatagcatttgggtctgatatgtcaaggggaggactggggaagagggacgttgggctggttctttcattcatttgacatttatggagcatctgctgaacccaaggcaccatgtaaaaggcacagtgaacaagatactgttcttgtcctcttggattttcagagtttggggaaaacaagcaaggaagggataattacccttggggaagcacaggggtgacacagaggaggctctaacccagtcctgctggtgtggtttgagggggctttgaagacaagacattcaatacctatttttgagtcacaagtctactctgttccccttcctttaatgggacagcttttaagccccccagattccttcctaagtgctccagctatgtatcagctcaagtctgtgccctgattgtcatacctccttgagctaagcctctgcccccatcaaggaggcctcagctggccccaccccgtttctcttgtccagagcacgaggaatgcatggcaggctgtttgcagcaactgagtagtctagcaagggtgcctcttctgggacattgctcatgcctgtcccctctgcctggttactgtcctcctcctatctcctggcccatctcaatccaaatcccaccttgactttttcacatccacacaaatgctccctcatctgtgaagggggatcatagattgcagttgactgtggatgacagttgtgcgtgtgcgtggtttcagaaccatggagtattcatctctgtactctttatagccaaatttagcaccacggtgcttccctggaagttcacagtaaggattttctgagtgagccaatgaataaacggcatcctaaggacttaagggagatggcaatgttgtctggttctaattctttacacctgtccagcaccaaatagttgcagggcacttcgaaacttgagctcgttaatcaccacccagaggcacaaggtcaacagagtgggcgttgcttaccaatcagggtttttcactagtccgggcaataagcaaatggctttttttgtttttgtttgttttgttttgtttttttggtggtaagaaaatggctttggctaaattaatcaaaaaggacaggtatgggaagggcacagagaagctcacagatttgtgaccctgaccaatgaaagaaatttattttacattgcaactgattttacagtacacttatttatataacagaagtaacatttagaagaatcagtactgacctgaggccaagtgtggtggcttatgcctgtaatctaagcactttgggaggctgaggcgggaggattgcttgagcccaggagttcaagaccagcctgggcaatatggtgaaaccccatctctacaaaaaatacaaaaattagctgggtgtgatggtgtgtacctgtaataccagctactggggaggctgaggtgggaggatcgcttgagcttgggaggtcgaggctacagtcagctgtgatggtgacattgcacagcctgggtaatggagtgagaccgtctcaaaacaaacaaataaacaaaaactgacctgagtttaagtttatatgctgtatcacttttaaaacctgatggccaaggacccagtacactgatttcatgttacccatagagggtcacaatctgtgtgtaaaatattggtttaaaggataaagccaaactcctttggaatggtatcaaaggttccttggtaacccagcccctacccgcctcccagcccctacccgcctcccagcccctacccgcctcccagcccctacccgcctcccagaccttacccgcctcccagcccctacccgcctcccagcccctacccgcctcccagaccctacccgcctcccagcccctacccgcctcccagaccctacccgcctcccagaccctacccgcctcccagcccctacccgcctcccagaccttacccgcctcccagcccctacccgcctcccagcccctacccgcctcccagcccctacccgcctcccagacgttacccgcctcccagaccctacccgcctcccagcccctacccgcctcccagaccttacccgcctcccagcccctacccgcctcccagcccctacccgcctcccagcccctacccgcctcccagaccttacccgcctcccagcccctacccgcctcccagcccctacccgcctcccagcccctacccgcctcccagaccttacccgcctcccagaccttacccgcctcccagaccttacccattcttgccgtttcagtttcttataagtttctgtttctttgaattcctttatgtaccctatgctgggtctcatgctggtgcctttgctcaccccattccatctgcccaaattgtcctcttctccttcaccaccaccccctgccccctactttcttcttcaagactcagcttatctccttggaataggttagagcctcctctgtactctcagaggaccctgagtcgggaaccacctgtctcagcgtcatttatattcccagaccctgccataggcctattgaggtggggtggtgaatctggacatctactgaactagcccaggtgatctcttttttttttttttttttgagacagagtcttgctctgtcacccaggctggagtgcaatggcacagtcttggctcactgcagcctccgcctcccaggctcaagcaattctcctgcctcagcctcctgagttgctgggattacaagtgcccgccaccacacccggctaagttttgtatttttagtagagaccgggtttcaccatgttggtcagcctggtctcaaactcctgacctcatgatctgcctgccttggcctcacaaagtgctgggattacaggcatgaaccgcctctcctgatcttatccatgtgcacattaacattggagacttactggtctagagtgtcagttccttcatgctactggctatactatttatccacatatatgctgttgtaatggctctccagcacctcacccctgtcctattttagaggaattccctgtgatatcatctttttttttttactttttaatttcaaaattattacttatttatgggttttgtttttttttttttgacgtagtcttgctctgtcgcccgggctggagtgcaatggcgagatctcagctcactgcaacctctgcctcctgggttcaagcaattcttctgcctcagcctcctgagtagctgggattacaggcgcccaccaccatgcctggctagtttttttatttttagtagagatgggatttcaccatgttggccaggttgttctcaaactcctgacctcagatgatccacctgcctcagcctcccaaagtgctgggattacaggtatgagccaccacaccaggcctatttatgttttttttagagacagagtcttgctgtgtcacccagcctggaatgcagtggcatggtcatagctcactgcagccttgcactcttgaacccaagcgatcctcctgcctcagcctcctgagtagctgggaccataggtgtgtgcaaccatgcgtatctaaccctgccatagcatcttgatggaagacaaaacccatttctccatagcatctgaaaaattctgctagcccagttccctggcacaggggacatggacatgtggccttgtctcagtcaagcagtctcactaacccaagactttgaatcaggagctggtgacccaaagcagcagagaaggtggagaatgctttggtggtggcatctccaagggtccagttcccagaagcaactgcggtgcagtgagctggggaccccggcactcacacggcgggggaggatggctggctctttggcatgagtttggcttagtctccctatcagcttcccattctcagaatctggctctccagtgttcgtggccatttggggacccagttgatagcctctcaattaactacctttctccttaaatgtaccagagtagactttctttgacacttacaagtatgaaaaccccatagatacaccagcacctacacatggtaaatatttgctgatacaggagtaagtcaccccaaagctcagggctgccattccagctttcatctcaatctcatttaagtgcacccttggccccaccccaagcacctggcaacccaacccttaaccttggccgttggctttgtcattccagccagtgaggcctaatggcagagtcacagcttgtgtatcttctttagggagacaaacttaatcccgtctgtcctcaggatggctgtgggtaagggtgtgacaggtaggcaggcttgtggagggggtagagacctgctcccactggagcagagaaaatggataaatggatttaagctttcagtatccccatgtaaaactcagaaatgcagcaattagaatgttctgtggctttggctggctaactaagtgcatgcaactgtcctctggggatagggattcttgtggagaaaacacattttcttctcactgatgatcatctcccacgtctaacagtccccagccaaccagctgagatcagtgaataagacttgaaggtgcatcagaaagagaaaaccaaccagtgctggggacacctctaaggcccctgcatactcactggctgccatgctgtttgaggggtggtgaaatgataacagtggcagaacaataactccatgtcagatctggcagaaagtgaaaagcatcctcaaatggagccattgcagagagtccagtcaaggaactcttttccagggtgtggacaggatgaagagaaggcagttaagagctttgaggaagcaccaggactgacaataaccaggagccaatccctactacttctaggctccaggggtgaggagatggagctggaactggaatctggagaggattgttggaggagagggctgcctggctggggctgtggccttgagtggagaggtacaccactgggacccagcagggagggaacggggaataaataccccaacctctttctcctccctcctgccttcagtttcctgtcagtgcttcttactggttccagccagctgcaagtccaagggaatgggcaccattgatgtggtccataaaggctaacctactggagcatggagcagagaggagtggagagtggatcaggaggggcaaatagagaaaatccacataacagcatagagaaggcttcctatgagctgttacgagtacagtgtgtatggaaactcatgtgattctgggaagaagcctagggactagtattattcccattttaaggattggggaaactgaggcacagagaagttaaataagttacccaaagtaagtgtgagcgtagctgccattcagacccaggcaatcgggatccagaaagtgttcttaaccactatgttcagctgcccaataaggtagtcacgagctacatacagcttcttaaatatatatcattaacatgaaaaacagcaaaaaattcatcaagttccatgagctacattcaagtgctcactggctgcatgtggttagtggctgccctgtgggatagcacagatatagaacatgtccccctcccagtgagttctgttggacagttctgcaccaggcctggacacctgacctggatcctttcaacccttgaattctctgcaaaacgcactcatccatactcctatcagtagttgtggtgttcctggcatggaaaggacgggggtcagtctgatttgaagattcttaggacatttcattgacctcctgatggctgccagataatgtagcctcatataaaactgagatcgttttttgtttttgtttttgtttgagatggagtctcgctctgtcgtccaggctggagtgcaatgacacgatctctgctcactgcaacctctgcctcccaggttcaagcaattctcctgcctcagcctcctgagtagctgggattacaggcacctgccaccacaccagctttttttgttttgttttgttttgttttgttttgttttgtatctttagtagagatggggtttcgccatgttggccaggctggtcttgaactcctggcctcaaatgatccgctcacctcggcttcccaaagtgctaggattacagatgtgagccaccgcactgagatcgttttatatgggccatgccttttctcacattctaaaattcctttcttattctgtcctttcctatcataatatcaaggacatcccataataagcaaaagcatttctatcaaaggtgacagaaaaagtgactggcacatttggccatcttgtccccaccccattttggagatatttgtcttcagggcttaggggacactggcatcctgtgatgtacagcatccttccatcagctcccatgagaaattctctgttgggtttaagcaatccccaaatatatcatattgacatgaatatatcatctcctcaatgtccagcattagcagacaagatgagtgctgaagatgatataactcctacctcttatgtaggctagaggtaaagtctggctctgtctgactgtggggacatagcgaaaaggaatgtgggttaatatcagatgacctcccctgcagatacagagatgcagggtctgtactttctgggagaggaagcaaaaagttatctctgaaccactgataagtcaacctcccagcaaaaatgaatgctagcttttatatatacattctctctcacgcacgatccgtgtatacctttccacacatattactatgctgtgtataatccctgttaagtgtctctgtgaacatttttgcatttcattttattgcaaataatcatcacaaataaccttcactgttgctttttgtgcaaaaaactctgtgcacttactatattatctcaattctcacaacagtaacgataagatagaaaccatcgctattcctatttcacagagggagagaatatactgcttagggtcacacagccaatttagtggcggaactaggatgatagctagatctgtttgactacaaactcatgctcttcccacaattacactatgctatagcagagttttgcaagccctttttggctgtggaatgcactcagggagcttttccagaagcctaataggtgaaatagacaaaagttgagctggattggttgaaatgcaagtgcaaagctgccagtctcgtgtgctcttgtcccctggccaccctcccaccagacataaccactgaaacacctcagggatccacttggactcagaaaaggccagtttgcaaaacactgtctacatatccctttaacagactgcataggatttacctttttatttgagacagagttttgctcttgttgcccatgctgaagtgcaatggcgcgatctcggctcactgcaacctctgcctcccgggttcaagggattctcctgcctcagcctcccaagtagctgggattacaggcatgtgccaccacgcctggctaattttgtatttttagtagagacggggtttttccatgttggtcaggctggtcttgaactcccgatctcaggtgatccgcccacctcagcctcccaaagtgctgggattacaggcgtgagcaaccgcgtctggccaggatttacctttatggatgtagcatcattaatgcaccaggtggcgtcctgctgtgataaggagtcttgatgatacattttgaacactttcatgatatttttctgataaatttatagaagtgaaatgtttttgttaaaatatgtgcccattttaaccccaaactctcctttgcaaaggtgaaactgcataaattcacatctgcagtgccagattctgcacatttttcctgcatcgggatattactatttaaaatcattttttttccaattgtctatgcaggggtacattgcaattgtttcaatttgcatttttttgattattaaaaaatcagacaaaatctctacttgcttttcttcttttacacataaccagttcatactctttgcattttatttttcccctattagagcagtggtttttattatctgtttgtaaaagttatttataatgtaggattattaatcctttatatgaatgtagactgtcagatattcatatatatcatgtgtcatatagaatatgtcatattgaattttatcttttattgtgtttttgatttacagatgttctaatttttaagaccatggggccagataaacactcacctatatcttttacatttttgattatttttaaaccttaaatatttatttatttatttagttagttagtttaaaaatgaatatattacaaatagagatggggactcacattgttgccctggctgatctcgaacccctggggctgaaacaatcctcctgccttggcgtcccaaagtgctgggatcacaggtgtgagccaccacacccagccaaagccttaaattatttaattcatctgaaattcaatttgttatgtcatataaggaagtgaactaattttatttcattttccttcttttttttttttttggagacagagtctcgctgtgttgcccaggctagagtgcagtggtgtgatctctgctcactgcaatctccacctcccaggttcaaacgattctcctgcctcagcctcccgagtagctgggattacaggcacgtaccaccacgcccagctaatttttgtatttttagtagagaaggggtttcaccatgttggccaggctggtcttgaacccccaaccactggtgatccgcccgcctcggcctcccaaagtgttaggattacaggtgtgagccacctctcccggcttttatatatatatatatatatatatattatatatttcattttcttatctgattgcaatggcttgtacttatattattaaaatttagcacagtgactctcaaccaccattgcccctaagtgcgtgttgggcaatgtgtagggacatttttggttgtcataactagcagtgaggagggaggggtgtgtgttactggcatccagtagctagctacaggccaggggtgctgctacatatcctataatgcatagtcacccacaacaaagaattatctggcctagaacatcagtagagctgagatcaagaaaacttgtgttaactattagtggaatcagcaagtcccttttgctttttgtgtttttctcgttgcaaaccagatcttcatttgttaaagacagcttgccctaatatatcagatcctcctggaaatttattgtctaccacagacagagtgatgcagacagtgctatgaggaatatgcagactcttgggtcaatgctgaataagaaataaagcaaagcaatgcagacataaattacacgttaacagtatatgctgttcttcctttcttaaggcacctgtgctcccttgacaaagaggaataaaacctcttcagactactctcctatcgattctctcctggaacatatgaccaccatcaattataggcaagaacatgaacacgggagtcccaaagacttgggttcaaatgtcagccccttcactcgctggctgtaggtgtgaggccctgggtaaggtccttacctccccaagtgtctgagcctgttcccgtataatgttcacttgccttgaatatcatgaaatgtacattagactttgtaagtaaacacctagctgagtatctggagcatagtaagtgcttatcacacattccatggagtcccagacacgagcaactaatgctcctgccgtccgctcagtttgagaaagggatgaagtgcaacctggattctcgtggatcattgcaatggcaaagcttctgggaatccaggaaccaagagaggagtccagcagcaaacacctggccggggctttatgtcaattactttttaaacgtttaccacaaacctatgagagaagtaattttattatcctcattttacagatgagggagctgaggcacagcagttactacttgcccaatgtcactgagctagtaaatggcagagtttggattctagagtcctgcgttttaccacctagtcatgctgcctcaccacccttcttgcctgtgctccccagcagctcagctgaggcgccctccccaggccactcccacctccaagtttattcccatagcccccgtcagtgaggacaccaagtcctgcactttgagcttgaggcctctgctatggacagcactgggtgatgctggggagaagcggctgaggtttcatctgtggtttatgctcaaagcagctgctgggtgggccaccaattggcagaagtagctttctaatcaagcacacttgcaaagggtctcatacttcccagtatctgggaactgtccccaaggagctcagatggcagcctggctggcttcatgatcttgggaaatgtagttagcctctccatgccttagctggccgttgggaggagattcaattacatgggaaggaatgaacctgcaccctgcagggcctgcctcttaatcaccggctggaataagcaagcacctaagaaacaggaaggctaccctggccaggacctcattaacttaatcctgttggtctcctcagctcctgtggggctattgcagaggagaaacttctggaacagagagctccttgtccagggatgctgcatctgggtgagctgctccttggatatggtgcaagtgtggccagggtgtggtgtggaaggagcagaagtcttcaggactgaatctggatggaccactgtgacagctgtatacccaggtggtaccagtttccctctctgcagaagtccccccaacagcaccattctcagtgccatacctggcctcatcagggctctgatgcaagacactgtatatgcagaatatattatttcatcctcacaacagttctgtatcttccacattttataggctaaggaaataggctcagggtagtcaagtagctttcccaaaggcacacagcagcagaaggggatttgaacccaatttgggctatctccaaaccccacactttcggaataactgtggaggtatcaggatgcatctattatatgtcaggggactgctagagactcaaagccctcccctcctgtccataggaaaggagagaccccttagtactgattgctttggtggggctctggcactccgcagtgatcacctataggaaaacatggagtatcagaatattggtctctcaggaacctggctttgtggggtggtttgaggcagtagttgccccttcatatgtgcacccaggcccctgccagacaggtaatcacattgcctcctccttgtggcagattatatttcccagaaagtgcctgcaacaatacttccagtcccatatgtgcttctagagccggtcactctctcagtttaaaggtggagtctatttcccttccccttaagactgcctcagtggttagactatggcaagaaagatatcatgtgacttccaagacaaatcctaaaaggcaacacagcttccacctggctctttctattttgagccacttacctatggaacaccagccaccatgttggaaggaagcccaggtgacatggagaagcatctgtgagtgctctggcaggcacgccagcttgaatctcagccatcagccagcatcaaccaccagatgcgtgagagagagccttcacatgacttcaggcctcagcctgcaagctgtcccagcttatgctgagtgagcacagacaacctatccctgctgagccctgtccagtctgcagatttctgagcaaaataaatgatgttattgttttaagccactgagttttggcatagtttgttatgcagccatagtaactggaatatcctgaattcattgtttccagtacagcccattatgctcacacacagggctgcccacccaggttgttgctcagcacaggctctgggctcacttggtccagagctaagggctgtgttagcctgaagaggtgcctttttgtaagtggtcttgcccggagagcaccatttcctttttcctacaggggtactgcatgggctagctgcctccctgctcacagatattaagattctagaacatgtttgttgttgttgttgctttgtttttgtttttagagccaggattttgcttcgttgcccaggctggagtatggtggtgctatcataacccactgtaacctcacactgctggtctcaagtgatcctcctgccccagtctctcgagtagctaggactacagggatgtacctccacacttggctaatttattttttattttttgtagagatggggtcttgctgtattacccaggctggtcttgaactcctggtctcaggtgcttctcccacctcggcctcccaaagtgttgggattacaggtgtgagtcactgcacccacccagagtgtttttcttagtgttgagtaaaacctccactctttaatttccattcacttgtcctaattctattgtctgggtgtcatgtggaattaatctggtttctttctggtgtcttgatggtcgaagatgtcactcatgatctccctgaactttcaccttgtcttggctaagacctcgctgttcttctggcctttcctcttagaaagaaagcttcttaggcttatcaccatcctggctttccttcctcccttcagtaccttcagtaccttcctttgatctctggcaaaggctggctcccaagtgggcgctgtccctagagagaatctggcctgcatttgacaccagtactcagcaggctggcgttttcctagttgtcttgaaaggtcagtttaagcaggcattggaacaggagaggaacagcctctgctcctggggcatgtggctggagactccttgctgcccaaaagacatagtcccactccttgtgcctgggaagccaggccaaccagtcaccactgctgctctcggccacccctgcccgctgctcactgtccgagggtgcagagctgggcctatattttcccatgaggccataactctgcatcagccgcagcaaccatgagctctatctggtttcaagacaatttcatcacccctaatggagactccacaccccttaagcaattactctccattcctcccatccgcaaccatgaatctgtgttctgtttctatggatttgcctattctggacatttcatacactatgtggccttttgtgtctgacttctttcactacgaggttcatctacctcaaagcatctgtttctaccccaggcctagttagtcatgctggtcctggccagcggttggtcccttcctctatgttctagccagggtgaacttaaaaattgtcactgggtctggatgttggggatcagcaaacgtgggtcactgccaggagtaccaggccccgaatccatctttccattctgggtgaggaagatggatggggagggattttctgagcttggattctttcttcaacccttggccactcagagctggggtatgggtgaggccctctaagagagtggtgtggggtgaagccctccctggcctccagctgccacctcaggatctttgcatctcctgtccccattctttgcccagatgttggcataccgcctcctaaccacctttactcagacaacacctcctctgctgctcggccttaaattccaactcttcatcttgctttttcttgctttttttcttagcattaatcactagctggagtgtgtgtatgtgtgtgtgtgtgtgtgtactgttatttatcttgttttctgtctttccattcaaccagaatggaactcccataattgtgtctttggtctgctactatgcacccagtgtctggcacatagtgagtgcttgatgagtatttattgaatggatgcatggatgtctgacattcatgcccaggggacctgcagccttgatgctggtgccatcctagcctcgagtgtggaggtaagcctgaatttggacatacggctaccttccttagccccagcatcactggcttcaatgcaggtatggccagagcctgctccagctaggccaggggtctggccagacaggtctggggaggaaggcaggtgtctgactgtagacttgaatttaacccagtctttgccaaagaaaatgttgtgtgacttgcacaagtgaaacttgaagttctgtaaatccagttgctccagttttctgtgtggacaactcagggggagcattttcctgagtgacatgtgctggttgacctgagatcattctgggtgtttcattcctctgatcagagagagcagggaatagacttaggtttgggagattttcctgaattctgatatctgacaagtgtgatgaatagtgttcaacaaacacgaaggagatctttagtcctggagtggaagagtaggaacctgaggcactcccgtttaggtttgggtgtggattataggagggagagtcctagtccaggaaagcaggctgtgttcctcgtatattatgaagttgtcggctgtgtgtgtctatggctatgtgtgtttctgtgtgtgtctctgtgtatctgtgtgtttgtgtgtccatgtgtgtctttgtgtgcttatcttcgtgtctctgtgagttgaataaatggggatctgaggggcagttctgggttctttgtccatggcagtcgagatgatctctggtgtgcctggtgttttagtggcaatttagctctctgagatgtaagcataattgctttctgtccttctgttttatttctctaacagtggttttcaaccctggctgcacattagtcccatctggagagctttataaaatactcgtgtgtgggtatcacagcacaccagttaaatcagagtctccagatgtgggaccagggcactggtatgtttctgaagcttgacaggtaactctaattgcaaccaatgtaaggtgtgttctgaaaccctttagtgaggattagggggaaccacactaaacttgagacctggaggttttgttactggctccatcattaagttgcctttgaccttgaacaggccactttgtctttctggtcccttaatttttttttctttggtaggatgcagataattgcattatccacatggatgtgcttcctgcatggttgtaaggtcaaatgtgtgaaagggctttgtgcattctgaaaggatacaagaacgcaagaaaatattattagcattatttgtgttagccccttgtagagacccaaaaaatggggccagagatgggcgtacaattacagcaagatcgtagtgaaagaaaaaccgaggagcacatcctgctactctgatttagttttcccaagaccaggcaaagccaagaacgcctatgcttgtaattccagaagctgacactagggggtgcccgattcatggcatggatggcaaagatctcatttgacgacaatttcctgttccctttggttaaaatagtttggcagggctcagtggctcgctcttgtttgtccccagctgtatgcaaggaggatccttgagtcctggagtttgaagctgcagtgagctatgatcatgccactgcattccagcttgggcagcagagtgagacatggtatttaaaaaaataaaagtaaaataatttactaaaataaccatttagatattaaggtgagagtgtaaatgcctttctcacactatctctgtgcagtcagatggtggttttcattctgcccaagttcccttcctatgttccacctctcttgattcttctggcctttgtagtaaaaatccttcttgggcctgaagctgggcttgcccactcagatttcagagaaacatcaaacagctttggttgctggcaatgaaccagggaggaggcctatctggctcctctgcagacttaattagctcttgagctgctctttctgtcaatctggccttctctgctcctccctccctcttgcttttaaggagagaatctcattttctgctcccaggggcccattctttgcaagccactttagctttctttcctttctgtgatcaggaaagccggatgtagatgtcaaggagggtaattgtaaaagctgactgacactttttctttctgcaattagggaagcgtgactttgacaactaagccaaatcattcattcccctgcctttgaaactcacccctgggtacaagttattttgcataaaattactcaatattttcatagaaccaacccggggactgctacccagttttcttctgagtctaggtcatttgtttgtttgtttgtttttttcttctctttttctaagtatttgaaaacacatctgaaatacacagttgccaatgttatgggtcagttgctataaatacaaactttttggaacaatgcacatgaaatgatgaacaatgaatgcctctggggacaagactggatgtttgagctggttcatgttctcgtataaaatcttctaaaagcagggagcttggggtaccttagctgactcaataccatcttaccttcactccttcaggccttagagaaaaggattagaaggaggggacttctttcaccctacggtcacgcaagcagaccaggtccccagctatcctttcttgtagctttatgggaatatggagagtgggttttccaggtgaggtgctcagaaaccaaggaaggaagaccctgggcaaattgctaaatgccagatgctgtcaaagcaaagtcctcatggaccccagtgggaggaagagcttgtgtggtgacccagtgtagacaggaccccatgtagtttctggactctggaacaagatccttgactgccatcttttgtcaggtcctcttcaccctttccctctaccctcacttcttcccagctgcatacccttccccttcttgagcaaattctatggaatcttgacccagctccctgtcaatccattctcataacacctgcctttctctctttccttctttctggagtctccttttccatttctgagaaattcttcctttctccaggggcaagtctttctacttctctccttctttctttctctttttttctttctctgtctctcttttttttttttttttgagacagagtcttgctctgttgcccagactggagtgcagtggcacaatatcagctcatggcaacctctgcctcccaggttcaagtgattctcctgcttcagcctcctgagtagctgggactacaggcacatgccaccgtgcctggctatttttttttttttttttgtatttttagtagagacggagtttcaccctgttagccaggatggtctcgatctcctgacctcgtgatccgccagccttggcctcccaaagtgctgggattacaggcgtgaaccaccgtgcctggcctctttctttttcttgagacagggtctcgctctgtcacccaggctggaatgcagtggcacaatcacggttcactgcaacctcgaactcctgggctcaagaacttctcccacttcagcctcccgagtagctgagaatacaggcacgcactatcacacctggctttgttctttcattgtagaccatcatggccccttagacctgacctgaaatcaccaaagaccagatcttccttttttaaggcaggcaggtcttaatctcacaaccttttaagtttcatattgcaatggtctggccactaatggtctacttctttgtgtttaaataaaagcaaatctgaataaaacccaagttttggctgggtgcggtggctcatgcctgtaatcccagcactttgggagggcgaggcaggtggatcatctgaggtcaggagttcgagaccagcctggccaacatggtgaaaccctgtttctactaaaaaaatacaaaaaaattagctgggtgtggtggcgggtgcctgtaatcccagctactcgggaggctgagtcagcagaatctcttgaacacaagaggtggaggttgcagtgagccgagattgcgccactgtactctaggctgggtgacaagagtgaaactctgtatcaaaaaaaaaaaacccaagttttaaatcaaggtgtatttgcttttcttttcattccagccatagtgagcagctttctggagcaggtgtggcccaccccatttctaggactttgcacttgcaatccctgctgctgggaacacccttcccttcactgtcccttcattttccccactcctttctttttatagggttccttttggtcatctcttcatcctgtaaatgcataattctcaaagtattttgttagcacacgccagacttttattcaactcatgagtgaggtgtggtgagctgttacagtaatggtcctcagtttatccacacctccctgtgtctgcaacttcccaccctgcttgcccatatgacttgccttgacccgtgggacatgacaaataaaatatgggccgacactcaaaaagtacttgcatgttgttgcttactcttgctcttgttcttggaacccagcaagtagcagataaaaaccacaggcctgcctgccagatgatgagagacacagggactcgttgtcccttatacaggtgagggcattttagaccacggagtttccaagtgtcctgccagttaattatagatgtgtaagcagaccagcagacattaactaccccaaccagaagaacttcccagcacacaaaatcatcagtaaagaaaggcttcttgttttaagccactcagttttggaatactttgttacacagctgaggctgactgatacgtgagagaatcagcaggaaaaaaaaaaaaaaacaagttcattgaagatatgaggaactgggatttatacagcaaaaggaaaaagaatgctgaaataagactgcaaaattcagtgtaaaactggttaatacctaaccaggcaataaaaagtaacctttggagttatctcaaagactcatagatggtggcatttaggaaattaaagaaaacttttatctttaacgagcatcaaggagtcagccttttcagaagggctggcttgccaaatacaaaacacaacgagcatttgaagaaaaaaaaacctgcaaaatgaccaactcataaagtttacattaaccttttcatggtgaaaaacatatttctcatatcatcctcataatcccaaaggtcacagcaaatcttcagatatcagcatagcaaaattcaaggaaaagatgattttgttaaaaaagagtctaggtttgtgggaaatagccaaggttttgtgatgcaggtgacctgagccaggcagggagatcttgttatttttgcttagttttttttctagctgtagtagataaagaatgcaatgatagcagtgagccgagatcatgccactgcactccagcctgaatgacacagtaagactctgtctcaaaaaaaaaaaaaaaaaaaagaggaagaatgccatgataccggaattagaaagtctcagtgtcagtttttatctttacacttctttcttggacagaaaaaaaaaagggctttatcaattttatacaagttaactttttattttatgtctaggcccttgccaagaatgtatcaaataaaggtacattgcataaaagagagtcagatgacccccaggtgggatttttagaaaatgctcaccgggcatggtggctcacacctgtaatcccagcactctgggaagccaaggtgggcggatcacctgaggtcaggagttcgagaccagcctggccaacatggcgaaaccccgtctccactaaaaatatgaaaattagcctggcatggtggtgggtgcctgtaatcccagctacttgggaggctgaggcaggagagtcgcttgaacctgggaggtggagattgcagtgagccaagaccgcaccattgcactccagcctgagcaacaagagtgaaactccatctcaaaataataataataataataataataagagagaatgctctagcatggatggttggtcacacaatctttttttttttcttatatctaagtcgtgtcatttccctaaacaaatctttccctgactgcaagctcaaggtaagtgccgctccttctggctgccatagtgcctgagcctatttgtcacagtctcctttaatcctgtggatgcctgtttgtttgtgaagtctcctcctttagactacgccctccttgaggttggcgacgtatgttatacacctttggatccccaaagtttagcgcagtgccttgtacaagcatttggagaatgattctatcaatttattttttcctcatgcaaccaaggacagtatttcccctacttggcagcaccagaatttccaggggtgtattgttaatcagcttcccaggtgatttcattacagtgatgtgcaggaggcagctggcactggctggtgacagccgtttctgagcattttctgccaactctgtgtccaataacaacacattggtagtttgaaattgagcacggtgggagtatttacaccacgatatcagcaaatgttacaaatcagggcgtttttttttttttagatggagtctcgctttgttgcccaggctggagtgtagtggtgtgatttcagctcagcacaacctccacctcccaggttcaagcgattctcctgcctcagcctcccgagtagctaggactacaggcccatgtcaccatgcccagctaatttttttgtatttttagtagagacaggtttcaccatgttggccaggccgatctgaaactcctgacctcgtgatctgcccaccttggcctcccaaagtgctgggattacaggcataagccaccgcacccggccagggcttttgtttttgagagcctgtttacctgctctccaccaagtctgctcatctctggtccaaagactaatgtcagagaattgttaactgagggtgaggtcggcaaactatgcctgcttttgtactgcccatgagataacaatagattttaacatttttaaaaagattgtgaaagaggaagaaggagaaggagaaaaggagaacaaggcgaagaaagatggggaggaggaggagaagaggagaatgagggagaggacaaggaaaaaaaagaagtagtgatagagactgtatgtggcctgcaaggcttaaaatgtttaatatgcagctttttatggaaaagttttgctgacccctgacctagggaagctccttaaatctgactgcctggtaaaatcatcttagagctttttttttttgagatggagtctcgctctgtcgccaggctggagttcagtggtgcgacgtcagctcactgcaagctccacctcccgggttcaagcgattctccttcctcagcctcccaagtagctgggattataggcgcccaccaccatgcccagctaatttttgtatttttagtagagacagggtttcgccatgttggccaggctggtctcgaactcctgatctcaggtgatccacccgcttagccttccaaagtgctaggattacaggcgtgagccactgcgcccagcctcagtttggctgttagaaggactcatttggatgcacgcattccacattaaggtggatttctaaatcctgctctccctatgctgtctgaagaggatgctggcttagcccactgtcccccaacacccactgtaggtcctgcttccccagaaggattcttttgaacttgtgcagactgaagatacaggagagaaggggaggctggggacagtagcctgctccagatctccatatggaaagtgtgggaggctggaaaagttgacagtgaggaacttgaaactgcatttgacattgggcatgcctattgtcaatattgaagaatgaatgaagggatgagattgtgggaggctcctagtcccctaattccccttagcaccagatagagggatttgaaaatgaagtgtgagacaggtttacaagcagacggtgtaaatagatgggagacaaagcatatttcaaagacgttttgctgtggcccacatgtagagacccttttgcagagttcagggaatacaaaatctaaacaacttgagtttttaatttattttattttaaaaattaacatctaataaagttgacattctttcagagaatgtatagttctatgacttgtaatccatgcatagatatgtttaaacaccactataatcggcatgcagagaattccatcaccccaaaaacctctcccctgctattcctttgtgatcatatcaccaccccaaccctaagccccagcaagcactgagaggttctacatcattatagatttgtcttttcaaacatgttctgtaatcatacggtatgaaactgacttctttcactcatcttagtgcctttgagattcatccaagttacttcaagtatcaagaactcattcattttccttgctgagtagtattttatggtatggatgtaccacagtgtgtttattgattcacaattgaattttcagttttgggcaattgtgagcagaactgctataaacgttggtgtttttgtgtggacataacttttcatttgtctggagtacatgtgcaggactggtattcctgggtcatctggtaaggaatatatctgtttaactttataagaagttgtcaaactggtttccagagtggctgtaccattttctgtttccaccagcattgaatgagagctctggttaccccttggatcacacatactgctagtattttctattgtagttattctaacaagcatgtagtgatatctcggagtggcttttatttgcatttctctaatggtgaatgatgttaaacatattcaccttccatatggtgtattttgttaaaaggtttgttcaactcttttgcccattttaaaattattttgttgttgttgtcattgttttcttattaatgaatgttgagagttctttctttatttttttacttttattttttgagacggagttttgctcttgttgcccaggctggagtgcaatggcgcaatctgggctcactgcaacctttgcctcccgggttcaagcgattctcctgcttcagcctcctgaatagctgggattacaggtgcccaccactacatctggctaattttttgtatttttagtagaaacagggtttcaccatgttggctagggtggcctcgatctcttgatcttgtaatccacccatctcagcctcccaaagtgctgggattacaggcgtgagccaccgcagctgacccaggatttccttttaaagcagtttttagccacaaatttaattaaaaaaaaaaaaaggtgattcacatcatctatttaaacttggatgagttgtggtcacttttggcttttaaggagttagttcatttcctctaaattatcaaattgatgtccatagagttcttcatagtatttcatattatcttactacctttttcaggtctgcaggatctgtagtgatatctcctctttcattctttttttgttgtttttttgagacagggtcttgctctgctgcccaagctcaagtgcagtggcatgattataatccactgaagcctagacttcctgggctcaagtgatccttctcccacctcatccacccaagcagctgagactacagatgcatgcaaccaggcccggctaatttgtgtatttttttgtagagatgggtttttaccatgttgcccacgctgggctcaaactcctgagtctcttaacagagacttttgcagagacactttaaatgaaattttaattttgatgaagtcaaattcatcattttttttctcttgtggattatgctttggatgtcattcaaccacttcttgcctaatcccagttcacaaagattttctgctattcttttagaagtttcatatttttggttttacatttaggtgtttgattctttttgagttaatttttgtatttggtgttaggtataaatcaaagttcgtttttaaaaatgtagatatatacttatttcaatatcaattattgaaaggactgtcttttttgactgaattacctttgcatctttgtaaaaaatcagttttccaaatatgtgtggatctattgttggactgttattctgttgaattaacctaattttctttcttaatgccaatatcatatgatcctatttaatacagctttataatgagtcatgaaatcaggtagtactacctttttgtatttccatgtgaattttagaatgaacatgtcaatttctttaaaaaaccctgctgagatttttattggaattgtttgaatctatatatcaatttggagagcattaaatctcaaaagtattaaaccttctgacacatgaatatcatatgtctcttcatttatttatttatttatttatttatccatttatttaacttctctcagcaatgttttatagttttcagtgtaaagaacttttctttatcagaagactttaaactgcaaattcaatttgtttaatatatagagagctattctggtatctattatcaatagttaactattttcaatagataactatcaatagttactattatcgatagttgctatcgatagttacctatttcttcctgaataagcatttatagtttgtattttccagataatttgtttatttcatttaattcatctaatttattggcatgaaattattcataatattcatttagtatcctttactatttgcagaatctgcagtatgtcacctttctcattttaattttttaattttttatttttttctcatttttaatattggtaatttgtgtctcatttatttttctaatcactttggctagtggtttacaaattttacttatcaaagaaccagctttgggtttcactgatttcttctattttttttaatcgactatttattggtttttgctctgatctgatttccattcttctgtttcatttgggtttcttttgcagtaattttgctgattttttaaaagatgagattctaggttgtttcttcaagaagttattttctaaataagcatttcaaactataaattccctctaagtattgctttagctgcatcctacaacttttgataagctgtgtatcatttttatttaattcaaaatactttccaatttctctaatttcttatttatttcttctttgactcatgaattcataaaagtgtgttatttagttttcacttatttaggatgtatatatagatatagatgtagatatagaagggtttatgcatatattataagtaccacaatatactattcttatttttgtttaaacatctacttatcttttaaagagatttaaataataaggaaaagtcttatgtatttatccaagaagttaccctttggctattcttcattactttgtgtagatctgtatctccatctgtaattttacttctgccagaggaaattcctttattattttctgtagcatggggctgctagtgatgaattgttctagtttttgaatatctgagaaatctttattttgcctttggttttgaaaaatatatttgctgggtaaagaaattttggttgtcatttttttccccagtactttaaagatattgctacattgtcttcttttttacattgtttttgatgagaaatacattgccattcttatctgtgttcctctgtagcatgtctttctgtctttctctggtgctttcaagtttctccctttatttgttttgaacaatttcattatgatgtacctgagtatagtttgcttcaggttcttgtggttgattttccttctcattatgggtcacattttcctgcttctttgcatgcttggtaatctttttttggttgccagacattgtgaattttaacttgtttggtgatgctagatatttttgtgtttctgtaaacatcttggagctttgtcctgggacacagttaaattacttggaaatagtttaatcctttgggtggggagttgtttttagacttactatactagagtagcatttagtgtagaggtaattattctgcactactaagtactgagtacttcacttaatgcatgtatcacgtgggtttttatagtgttttgttggaccaggcatccttcctactcctgctgaacaccttccactctcccctccagtcgtttccatggttcttttcccagccttgggtagtttcctcacacacacatgccaatcagtactctgctgaacaatcttttggaattctctgcagatttctgtctgtgcagctctctcctcctatctgatattttgcccttcagaccgtagctgatttcttctctctggactatcacttccttctaactcggggagtcttccagcctccatttatgttccccttccttataccgtggtctagaaactctctaatgccataagctggggcaacggttgggcttatctcttttttcccatctttcatttatcactgtatttcattgcctgatgtccacactttttttttttttttgagacagagtttcactcttgttgcccaggctggagtgcaatggcgcgatcgcgcctcactgcaatctccacctcctaggttcaagtgattctcctgcctcagcctcccaagtagctgggattacaggcatgcgccaccatgccaggctaattttgtatttttagtagagacggggtttctccacgtttgtcaagctggtctcgaactcccaacctcaggtgatctgcccacctcagcctcccaaagtgctggggttacaggcgtgagccaccatgcccagcctccacacttttgtaaactatcattttatatgtcttgtttgttaatttattttttgttatttcaggcaggagcataaatccagtctttgttattccatcttagccagaagtgactctttagggtctaatcgtaattcagaagttctggagttgctctatataagaatcgcttgatgaggcttattaaaatgcagatgctcccacacagcaatatggtgtctggagagggagaaaataatctgcatttcagtgaggtactctggccacaatttcagaagtgctgacttcagacatccttccatctttggcctacaactgtagtcttctttatagatttcaaagtgctctggagtcagattgattgtttccagttccatctctacttgtcactactgtaatatcttatctatcataaaaagataacccagagaagttaagaaatttgtctgagattacaattggtgacaagtaaggttacgataaagaataaattattttggcacatggtaagccctcagtagatgttagttattattgtatgtattgtatctcttgatagttataagagcccattttacagatgaaattggagccttggaggaaggtatagtgacaaggtcatttggccagcaagttgcagagctgaaacagaaacccgggtctgacttctagtacgaaacattctctttcctcagttgatggttatatcaaggtggagggttaccagcaaggggagaggaaccacaggggtgtgtgtgtgtgtgtgtgtgtgtgtgtgtgtgtgtgtttgcattaatgaggggaaactgcattacactttgcaagagggacaagtcagctattgtcatttaactttgtggagatttcctccaaacttcggggttttatgttatgctaagtcctcactacactccaaattaaatcccctgttgctggagttccactgatgtctcttgcatgtctcttactctgccttcaatatttaggaaattggaagtatgtgtatgtatggagggagggtaggactctggatttgtgatctggttcctttgccacgtccgtcagtttggcccccagtcccatctgctctagtatggcacattcagaagctcttcaagtgtaaagctatttataatacagagtaggatctatttatagataaggtaagttacagtcacacaaccctgagccactcaacttgcctgtttggttcaggtttgaagcaattaactgcccgtttcaaacaatccacctctttaattaccctttcatgcttttaccctttaattccatgtctagatcttctctgagttgagttctctttttaagcctctttggcttatggggaaaatggtattttttttttaactttaatacagggtctaccaagcccatttcaaaagttatgcttataaagcacaaagactttccccatgtaaggtagaccaagaagaatttggaatgaaggacagtacaaatactagccttatgcctggaatgtaggactacattgattaataagtttcaaactaatcagggctcttcccagtttgaatcacttgtgctacagtgggaggagtgatttgtaggtgttccctcgctatggcagctggtctaagttcacctacataattgacacctgagaattggcttttttgaactctaagaaatagcgaagataaatgatttcatctctggagccaatttctttttttttttttccttttttttttttttttttgttgagacagagttttgctcttgttgcccaggctggagtgcaatggcatgatctcggctcactgcaacctccacctcctgggttcaagcaattttcctgcctcagcctcccaagtagctgggattacaggcatgggccaccatgcctggctaattttgtatttttactagagacggggtttctccatgttggtcaggccgatctcgaaatcctgacctcgggtgatccacctgcctcggcctcccagtgctgggattacaggcgtgagccaccgcgcccggcctctggagccaatttcagcggcctggtggtggcttctgcagtcatggatggagaccatgccggtgcccagaagtacagttataagatcctatgttgatgatttacattggcattggagtgtgtggaggtggctctggttcatgggccaggtgtttgccctccttgttacagagttggcttccctgagctccccacactccaccatgtgtgtttgctgaagtgcggtaaacagggcaagagcagggagaaggttagaatgagcaaagcttcacctgagccttcccagcgggggaatcaagagccacaacccacgttgttccacacttatacgtttccaaagccttgtatggctgttactacccagcagacatctcacagccatcctctggagtctatagttctggcatcaatgttcccattccatagaagaggtacacagaggctgcccaggcacacaccctcattcccctgttatgctgaccaggtgctttggcttagtggtagagggggtccttgtttcaccaccagacttttgctttcactcagagagagagaacggaatggcagaaagagcagtaggtcaggagtcagaaagtgtgtgttccagtccagccctgtggcctcgggtgagtcattttacaccccagagtcattgtacatctcagctttctcatgtgaagcttgcataagtgtggtgcctcggctgggcgtggtggctcacgcctgtaatcccagcactttggaacgccaaagcaggtggatcactggaggtcaggagttcaagaccagcctgaccaacctgatgaaaccccgcctctactaaaattacaaaaattagcagggcatggtggcgggtgcctgtaatcccagctacttgtgaggctgaggcaggagaattgcttgaatccgggaggtggaggttgcggtgagccaagatcacgccactgcactccagcctgggtgacagagcgagactccatctcaaaataaataaataaataaaatataaaataaaataaaataaaataaagagtagtgcatcttgatcttaagccctgactaatttgaaacgtattaatcaagagcctcccaacctatgacagagaattgctgccagccatgagaattccttctcagctgtgctgtgtggctgtctaggggtccacatcgctgtgccggaggaaagttaaacccgcaggtagaacgaagacattatacttgaagatctgaggacatttaaaacacagtgaacaagcacaagtgtatgatgaggtaaaaggtaacattcatacacactttaatgataaaaagaggctttcaagatattctttgttcgaggctggcctctcccagctccatccccaggtcttgattcttctctcctctgtcattaagatgtgttggttaacaactgtcccaagcaaggagagggcaggtccctccagccagaagcaggggcaaagcctttgtcatgagagggggagagggatcctgagcatatgatctccatcgctccatctgcctcccagctccattctgccatgaattcctgtgtgagcagggccctgcgggtggacacgggaaatataattttctagcaccttgcatcatactgtggcccaagcagcatggctctgagattgctgtgacagaggggaccgctggggcaccaggccttgcctccctactctgccacactgccatgcagtctggcattttctggtggatttaatggtgaaaaatgaagccctattttgcaggaggtggaggtggggtctagtaggagctgccaggttgggaaaggctgagcagttggggacaggcaaagcagcagccagccacagaccccactgagttagtactgggggtgtttgtgagcccacatgagaagccacttggggattcccagaaaagggaaggggtggggtttgtgaaaggggacaaagtcctgagtagctgagggttgggggacagtgacaagcgccaacaggcatttagttgattgggtcttttgctacctttgttcacacaggcctttgagatctggatctctggtttcagttgttcctcccagatccccaggggtttatggaaattgtaatggattgttttaaatgtttcaaaaactctaatggaaatcataatacatttgttttatgctttttgtatacccagttatggggttatggatatgtttgattaataaatcatggggaaatgaatgaattattccttaatgattacagtctctttggcagacaacctatgtcaagacaagggagagaggagataaaactataaaggagggttttgatattgactagatttggaaatgacacagcaccagaggcagcccagtctagagctgccctaggctggcgggaccaatggcacagcgagagccatggagggaaaggcagatatcacagccatttgtccccaggtgtgactcaggaagtttttaggccagcagcaagaggtgttatttgagagccacattagaagaatccccatctctctcctgagccactatgaccagcagaaatttgaaaacgagaaaacccagcctcaaggggagtaggatgcttgcttaaagaaatacaattgttttgcccagtggttctcagaccatagctgtcatcagaatcactgggaagccttttttttttttttttttgtgaggcggagtctcgctccgtcaccaggctatagtgcagtggtgtgatttcggctcactgcaacctctgtctcccaggttcaagcgattctcctgcctcagcctcctgagtagctgggattacaggcgtgcgccaccacgcccggctaatgttttgtatttttagtagagatagggtttcatcgtgttagccaggatggtctccatctcctgacttcgtgatctgcccgcctcggcctcccaaagtgctgggattacaggcgtgagccactgtgcctggccggggagactttttaaactgcagacacagagggacccaatcccagagtttctgattaagtaggtctgcggtgagactgacaatctgtatgtcttacaaggttccaggggctgctgccgcggctggtccactggaaccacactttgagaaaccttttcccatttctcactttctctcttccatggctttgccactgctgttctccatcccagccttcttttaatcctccttccatcaacgtcattccctcaatacctttcacccttcccccaccccaccgagacccctctccttccttttccctccttttttgtacaccaggcccagcaagctcccccatcccacatgactttttccccaaacaaagggaaactcgatttccttgaaaattgaaatgtgaaagagatgggaggaaaaatgagtgcacccccctagttggtgaggacacctgttgcaggtgacttaagacggtatcagctggacaggacttgaggttcttcacagctgacagagctgcttggggctggtgcagtctgggaggactccaaatgacatggtttgttttcctgtgcccagagagaagatggacaagaggggttcacccagagggcagccctcaggcaggcacaagttcagcatcaaaaaccctttaaggtgaagttataagacttgagcgggcatcagaatcccctggagggcttgttgaatacccattgctgacccctacccccgttgctgctccgttagcaggtctaggatacagttagtatgaccagccagcctggtttgcccaggactgatcagggttctcaagatgtggaattttcaatactgaaaccaagaaagtcctggggaaactgggatgagtttgttactcgacggagtgctgaagtctttgcatttctaacaagctcctaggggaggctgaggctgctggtccagggactgcactttgagaatcactgctctattgttcccagggagctacagaggtctggtgttgggtgttgtagccctggactcttcttcagagtgagaggtcctgggcaggggtcagagttcagattctgaatagctgcagccagggaggtagatgtgaacttgggaagggagggtcacagagccccagattgatgcggagtggaagggattagtcagaaagatggggtcaaggggtgagaggacatccaagctgagtctgtgtgtgttgggtatatgcccaacacagaaaaaagctttgatggagggcctctgtccttttcactgtgggataagcctgtggctttggctggaagtgaactgggtgaaataggtaagagctgttctcgagggctggggctggtgcaggcacagctagtttgaagaaagaaaaacaagaaaggaaagaaaagaaatagataatagtaaactgggtgccgaaacttggaaagcagaggcaggccaaattcggcatttaaggtgttaacttataaaatagtgtgtagaaatggcatgcaaattatttgcatgctgacttgggggggtttgggtacacacagaccagtgcagtatggggtatggcagagatgtctgatggcagggtggctccagtgggaatctgtaccttacttctcccttccttttctaaaagttaccagtgtcaaatgctaaggaaccttccaagttccggttgaggcagtctttgggacccaggctggaatgaggcccaaggtgaccatctgttgaataaaggaacacacgtaagcctgcaaccatgtggctactgtaaagtcacaggcacttgcttctggccattccctttgtttagtccttggatctgtgcatagcactggctcacacagcaaagctgtggtattcccagattcatattcagcttctggtattctgagcctttcttcccaatacccctgacaagaaatggcttttttgttatccttgttttcctggctagcgcctattccccttgtgtgcctgccctgccaagaaacttctgggagtcttggaagaactgattcagctcttaaacaagttcagtcagctattagttggcatctattgttttatttttctgccagattattactctgtctaccaggaacaaacacaagtgtatgctggatgccttcaagtgctgagatgtatatcccagtatcatagagagtatgtttcccccgcaattctattcctttttgcaaccctttttctctgagaacaaacacagatggaaggtaaaggaagctgaacatatccgtgtgaagtttctgctactaggccaagcctgtttgcctgactccctgtacccttagggtttgtttttacccaggaggctctccgatcctttatgcaaatacatttctgagcctgcctcaacggtggcggtcagcttgtgatccagccaggataagctccccttcctcaattgtactgtaatttcactgagagatgagttcaatctgaggggcttcgaggctactgattggggggtgggctgaccttccacctagtatgaccgccttcccctggttttgtgggtcctgttggtcatctctgcaataagccatggggatgaggttgtgagaaatgtggacttgatcattatggcaaaccttaccttaaatagctttgaaaacaacaggtttatagccctagaatcaggaggtgatggcctaagatttacagctctacattttgatttttttttttttttgagacggagttttgctgtaggagtgcaatgatgcgatcttggctcaccacaacctctgcctcccgggttcaagcgattctcctgcctcaacctccggagtagctgggattacaggaatgcaccactataccgggctaattttgtatttttagtagagaaggggcttctccacgttggtcaggctggtctcgaactcccgacctcaggtgatccacctgcctcagcctcccaaagtgctgggattacagacatgaggcatgataccttctaaggtatttgccaattcaggaggctgcagaagtcctgaagactggtgctggatcacttgtgattgtgatgtcattattattacctcctaataggagggggctacctatagtcactcagcctgtaagtggcagggtggacagagttcaggtcactgaaaaggcccaattgcctctagagggaatgaacaggaggaggggccatgaggtgggcctggggaacagtaggaggctcaccatgcccagccctttggtggagagctttctgggaggacaagtccagatcagatgtagtccggctcaatgtggagctgcctggtggcattgtggcccctcctatttcctcctccctccctgccctgtgtgaggggcacccatgggctcagtgctgtggtatctgaagtgacgcagagcagcgtggaggcctgttccttcctgggcacgcggcacagccagggtgaggcccgagggggaaaggtgcatgactctgcagtatgagcgtgcctcacttccacagctgctgacctgctcgcttgcttgttctgcctgaggctcagcagggcttgggagaagccagtcagccatttatggagaggaaagaggcctttactggcagcctggagacctgggctccagacctggatctgtcacttttcagttgcttgaacttggtgaagccgctttacctgcggtttcagtttccccatccctgaaatgatggggttgcttgagagcctctctcttcaaagtgtctcaggaaccagtagcagcagcatggcctgggagcttgttagaaatgcggagtctcaggcccctccccagacctactgaatctgaatctctctatattttttttattttattttttgagtcaggatctcactctgtcacccaggtggagtgcagtgacacaatcacagttcactgcagcctcaactaccccaggttccggtgatccttccgcctcagcttcccaagtagctgggattaaaggcatgtgccaccatgcccagttaattcttgcattttttatacagactggatttcaacatgttgcccatgctggtctcaaactcctggactcaagtgatccaccaacattggcctcttaaagtgctgggattacaagcatgagccacagtgaatgtgcattgaacaagatccccaagtgatctgcatacagttggagaagcatggctccacggtttttaagatgtaatcccagcactttgggaggctgaggcaggcggatcacaaggtcacgagttcgagaccagtctggccaacatggtgaaaccctgtctctactaaaaataaaaaaattaaccaggcatggtggtgggcgcctgtaatcccagctactcgggagactgaggcaggagaatcgtttgaaatcagaaggcggaggttgcagtgagccaggattgcgccactcaacttcagcctgggtgaaagaacgaaactccttctcaaaaaaacaaaaacaaaaaatgatggcttcagggctcatgtcctccaattctgtaccgtaaggagtctctctgagtggtatccttgtagatgcaggtacggagcaagccttgccctggagcaattgccctgcaatttccacatgcactgtctaggtggccctctcagtttcagttcttaaatgtggttgctgggtggtcaatgataaattccaggaaatcctcctctgtgggcctcccttttcttcctgcaggctaatctaaagactagtaagtaatcagcggggactgcatttaattcaccccttactcctattatcacagatttattctatagtcattctaccaagcaacatggcctctaattgggtcgaacaaatgctctatatggagaaccaccatatatgcatttaacttgcagactaacagcccaagtgtgagagaggacgatgtaaatagtgtgggaaattccctagagtgagtgtgacatgtaaggtcggaatctgctgctcagccactctcagctccttcagtctctcttagacgtgaacatgtgctctggcctaagtgtgatcctagttttttaagatttgcatattttaaacaatgtggcttctactaagtgagagccaacgattacatttggtacccagccaaagaaaacagaaaatgattccacttctagaattaaaacaaaacaaaacaactatgctggtctcattaagagaagtcatgtggcctccaacacaatgtcttcccaaggaatttttcagagtgattttgattacatgcaacttttccttccctgtgaactttagaaccccaggtaagaggctctggcccctcacggtgtacagtcagttcagacatagaaagaaacttccaactgggaagatgaagaggattacaagtgaagatggttgggggagattctgagtaggaaagaaatctttcttcttaattccaaatgctcttttgtgatagctcctcaggtttctgagtccagcccaattcagagatagtagactggtggcagagcacagagatgccagaagacttcatggtgtcaggataacctgtggtctgtcttttttttttttttttttttgagacagagtctcgctctgtcaccaggctggagtgcagtagcatgatctcggctcactgcaacctctgcctcctgggctcaagcgattattctgcctcagcctcccaagtagctgggactacaggtgtatgccaccacccccagctaatttttgtatttttagtagagacggagtttcatcatgttggtcaggaccatctccatctcttgacctcgtgatccacgcgccttggcctcccaaagtgctgggattacaagcgtgagccacagcgcccatccttgctctgtctttatcacaccgtgttctacgtgtcccttccctggaggcactgtactgagtgcagaattacaggatttgcaccaaggcaggttaaacaaatgggaaaaggatatcctaaaactgggagaactgttatgagatcacaaagactcgcaaatctgtcctgttacataaaaacaaaggccaaatctccttctttatttaggtaaccacctcataccatgaaagatcggaggcagcttataagagacacatacactttaagggtgaattataaataaaaagtacaaaatgagaccaggggaaatataaattagtggggcaggtcgggctccagtgggtggcaaagcagagaacatctatccagttagcctatgaggcttgaccctcagagttgctgtccttgggctggacttgaccacctgtaacttaagataaaacagtcccacccttaaggtcatcaaatgaaagacacaaggacagcatagcagaggcctagctggcttgtcagaaaaatgcacgggagatttcagttggctaaaacctcaatatgagccactgcatggccaggctgtgcaaaggagtggggctccattaatagtgcacggtgtggccccactgaggaggagagagtcctcccgcacacagcactggctgtacgttcacatttgcaatcaacacattggaatatgtcaccatgtgccaactggtcagtgtcaaagggtagatacagtggaaccctccaggagctcacacagtctgtccaaagagccagtgaggagaaatagcaacaatcctgcttgatatgtgctcgcaggagatcccattaggactttggtgcttgtggttggttctaattgtttttctaaaaggacattcacaagaagaactacagaggatgagtcttctcttttggtgtctaagcccccagcagggctcctgataaaaacctgctagctactcaggcccttcataaacagctggcacaacagcagcgatgtcagatctggtgcagggatgctgggcttgtgatggagtctggaacctgccagaagcctggcatcacagccattctcggacatcctcgtgagtactttgaaagcctcagtattgcagcctctcgttcctcctggatgctgttaaagggtgttctgtaaaggaagggcatctccttgaattgattctcctccatcagatgggacctgtgttgaacaaaggaagataaaatggatcagcccccaacccaaatccatcaatttcaagcctgtgtgtggtgaaaccagcatagtctttggagttgccagacgtaggtttgaatcctagagcagcctctccatggcactgttaccttgggctagccctgaaaccacatgagactcagcttcctttgcctggaaaatggaaatttgaatcccgcactcacagagttgtaagcactgaatgagatcatgaaaataagtgattggcttaataaatatcaagattctcatcaaatcttagtttcctctccttacccttccttgcaggcaaagccgatgcctacctctctctgctctctggattctgcctcaacctccaccttggatgtgatcacaggttcatcttcgtctatcacgtcagcatcctcttttcctctctgctgactttctctcctccacttaccgtcttgctcaatgttctatatcccttctctaagaattcccaccttagcacggttatgccagcaggtgactgccctaccctcttaatctcatcaccaaatactttgaagatgaatctgcactcactcctcacccatcttcagccacccgataagtagcatcatctgatttctgtctccaccatttactgagaaaggcacattgctgggtctgcctaactgcctttccttaggcttcagcctttttttgatggctttgaagtgtttgatggtcaattcccctcactcttgataattgtccttctttgtcctctttgccattggcataacgtctcttccttattattactgggaacttccatttgggctcttccatctgctttccttttcccgttccccacatgcaggcatggatcaaggttctgacttggctcctataggaaacatacgtgactaggccaggggctggcaaatgttttctgtaaagggccaggtagtaaatgtcataggctctgcaggccacatagtctctgttaccattgctcgaccctgccactataacatgaaacagccatagataatatgagagtgaacgagccagtctgtgttccaataaaacactatctacaagaacaggaggtgggccagatttggcccataggttgtagttgcctacccctggtcttatggaaagagcataaaccacagggtcagatatacctggttttacaatctggctcgatcactgcctagttccattatgctgggcaagttacttaacctccatacaccttattatcgttatctgtaatagagaggaataataatgattatgatgataatactactttcctcatggccttgttgatagggtgaaatgggataatgtgcaaccctagggcctggttcagtgaatcttagtgttcttttctcctttcttcctcccccctttccttccctctcaccctccctccttccctccctccctccctccctcccttccttccttccttccttcctcactctcccaatcccttttctctctacatcctcaccctctgtaatctcatccacatgtctctaacccctaacctctccctccacatctgatctttcttctgagtttaaaatctgcacattcaatgccaattaggtagttctgctcgtatacgatttgcatatcaaactctgcatgttcaaaagaaaatgaatcattttaaacaaactcatgcctttttctgacctccctcattccatgccccaggggcgctttctgaaggctttgacaatgccacccccgatctgctgtagaacaggacaggccgttctccactcatgcagtctctgctcttctcccctcccctccgtggccatcatttcagcttgaacccttttattacctgccacctgagcttgctgaatggccttgctgtctctctgctgcttctctctcatccattctgcacacgatgctcagttactcttctacaggcaaagcttgatcatgttgctctctagtatctaacaccactgaagactcctccctcctctcctagtgtcagactcctcacctggtgttcaaagtcctgcacagccggcactgaagactccaacccccaggcaaatgtgcctgcttagcttttcctagacaccctaattctttcatttctgcagtccttccttttgcctggactgccccctacccaccacccacggctgctgtccctgtgccatctctacttgtcacattcttacctgttccttagcagcccagccagaaccacacacagcacgcttcccccagccaggaggttctgtgcctcctctcagctttcagagccctggcaagactgtgcttatctcctgcaatgcattttcccttggaaactttgtgaagtatcgtgcacatgctttatctctccccttagattaaaaatccctggagagattagagaaatgtttgctcctccacacagccctggcaccatgtctgcatggggcacagattcattgagcaggagaggagggctttttaccaggctcacctttgagctgacttggcagctccactggcctcctctgtgggcagaggggagaggctgcctgttggaaaaagtcgaagtggaggaacaagtttcattttccaaggctcaaggctgttagccttttggctttggttggtgtgagagtgggtgtgtttgtttctgtgagtgtgtgtttctgggtgtgtgtttggtaggtgtgagtgtgtggtgggtgtgtttgtttctgtgagtgtgtgtttctggatgtgtgtggtaggtgtgagtgtgtggggggcgtgtttgtgtgtgcatgaacacgtggagtagaagagggatgtgtgtgtacgtgtgtggggtgttggtgtgtgtgtattgtttgggtgtgtagtcttggacaccctattaaaaaaggacaagagtcttcatctgactttgcttggggacttatctttatctgcaggaaataaccaagaagtggaaaatggagcaaaaaaaaaaatctgaaaatacagtgaccaggtgataaaatcaaacggcagcttgtctctcttggagcacagttgatctataaaaatcagccactcgccctgaaacttcctgggggtgcctttgaggtttagcagccaccctgccctctctctggagaaccacgcaggctgtgggcagaaggcttgtggggcagccaggcccctgccttgtcctgaccgagcatgggacctcctcatctctggggcagggtgggggcaggtcctatcaaactcattttttaattttttattttttgggggatggagtcttgctctgccgcccaggctggagtgcagtggcacgatcttggcccactgcaatctccgcctctcaggttcaagctattcttctgcctcagcctcccaagtagctggggttacaggcacatgccacaatgcctggctattttttgtatttttagtagagacggggtttcactatgttggccaggctggtctccaacttctggcctcaagtgatcctctggccttggccttcaaaagtgctgggatgacaggcatgagctatcatgcccggcctcaacctcatcttacagagcctctgaaggctgagctaggaatgtgggcatcagctctgaatgcagggagcccacattctttccttttaccccgctctgagaatgagagagctggcaaagccagttacaatctgcccgtaaatcgtgaatgtgtctggaattgacatataggccaaaggtcgtaggctgtaggggaagtgagacgagctgcttttcaaatattttttggcatcagaaacttgtgttcatgtaaagtcttacgtgccagtttaatgtgcaaagctgctgagagctccactgttctgggtgaaatgtgtgttacggggtgggtagggctgctggactcctgtcccctcactctgcccctcaccccaggcccaattcccttccagggacattggcagaacacagtttgaaacctcccttggaaaccacatctttttttttttttttgagacggagtctggctctgtcgcccaggctggagtgcagtggcgtgatctcggctcactgcaagctccgcctcccgggtccacgccattctcctgcctcagcctcccaagtagctgggactacaggcacccgccaccatgcccggctaatttttgtgtatttttagtagagacagggtttcaccgtgttagccaggatggtttcgatctcctgacctcgtgatccgcccgcctcagcctcccaaagtgctgggattacaggcgtgagccaccaggcctggccggaaaccacatctttaactctaaagggaagtaaaatgattcgcccaaggccatggggtggaggagggttgggcagccccataagtgagcaacgtcctgaacagcaggactcagcacacacgaatctgtcactctgggccatccctgaaatgtgtcaggggatggagatgcagtaaagaatacaataaagaacatattaaaacttctaaagtttctttgaaccaggacaaaactctagcattctggagcagcattcagtctcatatctactgaaaaatcctaatgttgtacattgccattagaactgatcgtaatgcgtcagggcctcaccctctgtaatgtgctggctacctgcatcgtgactgacgctttatttagtcatcacttgcatagtgctgaacaaatattaatccacctaatctgggcaacatctttatgacgtagtggctattattagcaccatctccattttacatatttggagtaatggggcacggagaggtgaagtaacttgccccaagtcacgttgctagaaaggaataaaactggattcaagccagagtctaggtatggcccatgctcttcaacgccgggctattgaacttctgttcaatgagggaaggctgttcagggcacggagcctcacactggggactctgtgttgtttgggtacttgtcttggctccccaaatgggtttcagccggtaataatcataaccataataacctatactgtggccggggtggtctcttggaaacacaggtccaattatgttaagcccctgcctctgcttatatctcttcaatggattcctttttactgtttttttttttttttgagacggagtctcgctctgtcacccaggctggagtgcagtggtgcgatctcggctcactgcaagctccgcctcccgggttcacgccattctcctgcctcagcctcccaagtagctgggattacaggcgcctgccactgcgcccggctaattttttgtatttttagtagagacagggtttcactgtggtctcgatctcctgacctcgtgatctgcccacctcggcctcccaaagtgctgggattacaggtgtgagccacagcacccagccctcagtggattcttattgttcttcaagtaatgaccaaaatccttcagagggccctcgaggccctgccagatctggcctctgtctaccacagagccctaaccctcaccgacatttgctctctgcccttcaatctccctgtcgtcttttatttcctgttatcccaggacctttgcccaagccattgcctctccctgaaagactttccattcacctcccactcttcctttggcattcagcataatatcacctcctccaggaagctttccctgactccatcttctgagtcagtttctctattgaatattcttgtggcaggatgctcctctccttcctagagcagacctgactttgttattgtacttttgtaagtgtgaatctttggtgagtgtctgtctttctcacctgatggtaaactccctgagagtagagcccccacgtcatgtgtctttttttttttttaattgagacaggtctcactctgccgcccaggttggaatgcagtggtgcaatctctgctcactgcagcctgtgcctcctgggctccagcaatccttctgcctcaacctcctgaatagctgggattacaggtgtgcatcaccatgcgtggctaattttttgtatttttggtggagatggggtttcaccatgttgccaaggctggtcttgaactcctgacctcaagtgatctgcccgcctcggcctcccaaagtgctgggattacaggcatgagtcactgtgcctggtccatgtgtctcatttcttatccccagtgtcttgcacagtgcctgacacattccaacataccagcacacaaatcagggaccctttttgctctgaagtttcctgatgcaaagtgtgagttgacccccatcactaccaatttgagagacaccaaggtacttcacatttggactttgggtcagttaactcatcccagattatgtgttttgtatgcttgacatctggtgtaagaaccacatcaattgtacagcctttccctgccttatctcttttcgatccttgcagcaataagggccagaaatattctcttcatcttacagatgagaatcctgaggctcagagtgtgcaacctggccaaaaacacccagctaacaagtgctgaagatcagagtgggactgacttctcatctgtttctacatcatttcctaggtatgggcttaccttactctactgagacctcttcattttgcttctcttttctctgagttctgagagtcaggtgtaatcccccacaaaagacacaattattatttccttctttcaactcagcaacgacctttgctcttacttctggtaagggagtaagaaacgggagtgcctggatacacctgcgtgcaggttgggcccacctggggaggagggtatggctgcccaatggaccgtggctctgacttcagtcccctggagacagctgtccatctctaattcagggttgtaaggaccagaccactctatctctgggactctgtcttgatgtgaaaaaatcttacaactctctgcctctttggttgcacgcgatagactgagctgtgacatgcaactcagcggatgaaatccatgaagccaaactgtcttgacttctgggccttggagactggctgggcacatgtgttggctgcgtgtgagtgtgagtgagggtggggtgggaatactgcagagagaggaggtgtgtgcactgagtgggcatggaggcgagtagtccctaccccgcttcttgtatcccatctgggcaggtgcagggaggaagtgaacgagaggggccgttctgggtggttctgctctgtttgcttttaccgtggcccagttcacaccccttcatgtatgcaagggcacaagagtcattggggaactttccgtcctctcctgtgctaaagacttttctccccagcagagattcttcccaacagagaatgcagatggggtctttttgtccccaagttccgaggtaaagggataacttcccattgtgcccagaagccaggatcattcgtggtatatcaggggtggaaggggctgttgagactctctttccagcctctgcgaggaaaagggcccggaggagaaaacacctgccccacgtcctcttggctggccaccccagcaggacctgaggccagggccacaggatccccagtcagggtgcagtgtctggctatttgcttatgcagcctcaggaggcctggtcttgcccctgcttgtccaagcctctctggccaccctgccaggtaggtcttgtgtgcactcacctggtcccggcgtggcttgctaggtggaagctgcaacgtgttgctgcccaagagccccaggttcacagacatgtctgcatacagcacctgcgtctcttctcctcttcccatggccaaattacaggtccagtttttcaggagacacctcaatgttgagggaataccagatgatccagagcagtaggctgagagccaggatcagggcacctgtgtagatgaagaagtcccaggaactcaggggggccaagatccccagcagcaaaaggaccaggccgaccgcgtccagcaggagggcgaggatgaggaagagcgcacagcgccctggatggcatcttccccacagactccccaggagcattgcccaggaggagcgggaggagcccagctgcactcccgggggtgatttgcatgggagggtggcggtcctgcctgctgctgccttctctgcctgctgggtgtgagcaaatgagcgagctggcgcttcttggagccacagggaagtacacgtgggtctacctttatgagcacggcagccagtggggcaggatatttcttaactgtttcatggctcaggaatgatctggacccaaacagtctgacatcactgttaattgggctgctcatcgctgggacctacaatccatgtggcagaggagtcagggtgcccttggatgcatctgccaagttggcggtcctgtgattctgggggaggggctgatctgtgccttgttctctaatccctggaagccagagagcctgagtgccctgtttctgagacacagctgcttcatctagtatagcggggtggagtggtggagtttccattcctcttcacctccctgccctactctcttccttgggggaaaaggttttatgtaaaggacatagacaagagtttgtaagatcaatcgattttgaagcgttgctgtaagaattggtccatgttagcaagagaagttttgccttcttgtagagccctcactctgcagacggaaggatctgagttccctaggataatggacagtaaggataagggcgggaaaggggtagagatggaaaagacagaggggacagagagaagacaacagggtgagaagaaacttctggcctcttcctgcagtggattctgtgtggaccaaagggcaattcccaggcaaaagtcaagggatgtttccggggcctgttgcctctgtgttttctacatgaactcattttatgttcattttctttctcataatagatgaccctgtaagcccttccagacactgcctgcatcccttctacattgatgggagcgatcttatccccgtggctgctcacggcgggtgtgggggtgaacatcaaatgaggaaaatgcagcggcagtccttggcagggctgcagacagccacccctctgtccctgattcacagggaggctagaacagggcaccaaacctttctgggcctcagtttacccagataaatgaagaaaataatttccactctcacttttgccttccccagagggtgagaataagtaggtggatctgatttccttttttttttgagacagagtttcattcttgttgccccggctggagtgcaatggtgcgatcttggctcactgcaacttctgcctcccaagttcaagcaattttcccacctcagcctctggaatagctgggattacaggtgcccatgaccatgcctggctaatttttgtatttgtattagagatggggtttcaaactctacttggccaggctggtctcgaactctgacctcaggtgatccgcccgcctccgcctcccaaagtgctgggattacaggcatgagccactatgcccggccttcatttttctatgtgtaaaataagccaggatgagaaagaaactttcagaaaatattttggggaaggtggcaggggatgacctaaaccatagctcttaggatctgaaacgccacgagacttgagccaagccaggtgaacactctggacacctcaaagtgggaagtagctgaggccaatctccatctcagtacttgcctcctgtcccactaggtcctcggaaggggccaggtacctacagaaacacctcacattgctggggaagccatgactctttcaattttttgttccccctgtaggagagagtctcttgggaaaaactattgatggacagcaatggcctcttcccagtgccaggacaagcactgctgctgtgtctgcacagggctgggctaatgagtcctggtctagccatatacaggttcccaggtccctttgcagagtcctgtgtgtgtggctctagtccaccatggacaacaatttagcactaaaatttctgcatgctggaaaatcctttgtttctgggtcaactggcatggttggtcaatgtagtcccatctaactgggccacatcatactctcagttccgcggtctgcgttctctctcataatacctggccattctggcaaatcgctaaccatggccccactccaggtgactggccaggctgtgaagtgcccctccacctctgcccctgtgtatctttcttactcttgtttcccaaagttaccactcctgtgtgttgaggcagcctcggtatttgcacagctgggagagacctactgggacgtttgatgcaaagccaggtgagtctggagccctggaggggggcaggctagaaagaaaagaagggagatgaaagtgagtaaggagggtggctccaagtgtgggaaccagaaactgcctgggcggaggcaggcgtggacgaggggcaggtgatcagagagcagtttgctgcacccccgttagcaagaagaacaccaccaccctcttcttctcacggagatcctttgtgacttcctcacttgccaaggctggatccacagctggaaatagctgcatgctttgccagggctgctgtaacaaagcaccacagccagggtggcttgaacaatagaaatgtatcatctcccagttctggatcctggaagtcttgagatcaaggtgtctccagggttggttcccttgagggctgtgagggagaatggggtccaggcctcagccctagctctgggtggtttgctggccatctgtgacgttccttgccttgtagatgcaccactttgatctccgcctttatcttcacatggcgttctccctgtgcgcatgtgcgcatgtctgtgtccacatctcccctgttataagaagcaccatcctgctccagtatgaactcatcctaactaattagatctgcaaagatcctacttcgaaataaagtcccattctgagttactgggggttaggatttcagcatatgaattgggaggacagaattcaaccacagcccatagcaatacctaaaaggtttgtttgtttatttggacatcctttgatttctagctgtagtatagatagaaaatttagactctcaagccaagttttcagaaaaaacataattgcaaagtcagcaccccattgaaggtggccctccatgccagcaggcactgcttcaacccctccctgtctctcctggggacacggaggtgctgttggctatgtctgtgtccctgggcgagaggctgagaaggtggggtcttctcaccctgcttgggttctggctgctgtcacctctattcaccaagccaaggtgctcattctccacgagtgggtaaccctaagtgacccctacacattttgaagtttgagctgaagtgggatttaaattgaaccaatattattagcacctactatgggtcaggcagcaggatcaagatcaagtatgatcttgatcttgacctaacatcacagacataagatgctaagagtggaggcaataattaacacatgaatggtataatttcagattatattgcaatttaataatttcagaaaaaaatcgcaaaaacagggaagtataagacagtaggcatctgttacactcctctggacatttgctttctgaaccataacatggtgtggaaggcacaggtggacgcctagcccctggcctgcaacttccaatttggtcactgagggcccctctgcctctctccttctgcgattttgctgggctgttggggctgcagccacccctgtgcctctgagaggtttgtctttctgctgctgtctcacagctccgcctcttctcggcaactgagacgttgtcactcccttggcaaagtcatcatgatttgtcatccgtgatgtcaccagatgacagcctctccatgacctggatcctaaagggcaggcaactgacaccaggatggactagctaggtgctcagctgacccagcgtcacagatcccagacctgactccatgaatgacaaaggcccagtcacatcctgggtggcaggctcagatgttgggtgggtctagccatgccggcctgttcattaggtctgcctaccttttcatggtgcagagcttagtagagtgcctagctgtgccactcacttgctgtgtgaccttgagcaagtcacttaccctctctgtgcctcaatttcctcataggattactgtgaggcgtaagtgagtgcatgggtgtgaagtgtttagaacccgcactctgtaaacagggacaagtgttattgttgtggttgccgctgggaatctttacatttctgccatgatgcttatgtaaggaaaaacccaggttggaaggcatccatccatgactctctggcaccatcattttctcccctttaccaacctgggcttcacttggtagcagctgcctggcccttggcctccccatactaccctcactaaatctattaggacgtgcagtgctgtctcaccattcttcgatgggtacaaatcctttattttcatgaactcctcttcccagatccattttatctttcagatcccttacctctaccaaagtggctctttatcttcaccatcctcaaatccctcaacgccccctaatctcgtaatccagtgtttatcaagcttcacttattgtttaagtgtaccattccctgcaatttgtgtctcttacttatagaatattacattcgtttgttaatgctatattattttgttaatttttaaaaatggatttgttgtctctactaaaaaaatacaaaaaaaattagccgggcatagtggcgggtgcctgtagtcccagctactcggggggctgaggcaggagaatggcgtgaacctgggatgcggagcttgcagtgagctgagattgtgccactgcactccagcttgggcgacagagcaagactccgtctcaaaaaaaaaaaatggatttgttaaaactgcaatcagttattgtcaccatcagtgaaaaactggtgtgacttagacagaaagtacttgggaataaatatactgaacacaaaacaattgtaattaaatcagaccaggggtactcaaactctttctgtattgggccagatagtaaatgtttcgggctttgcaggcaatcttgttggtctccgttacagccattcaacactgccattgtagtgtgatatggtttggctttgtgtcccgacccaagtctcatttcaaattataatccacataattctcattatccccaactgtcaagggagagaccaggtagaggtaattggatcattggggtagtttcccccatgctgttcttgtaatagtgagttctcacgagatctaaggggctcatccccctttgctgggcacttctccttcctgccaccttgtgaagaaggtgccttgcttcccctttcccttccaccatgattgtaagtttcctgaggcctccccagccatgctgagctgtgagtcaattaaacctctttcctttataaattacccaggcttgggtatgtctttatagcagtatgaaaacagactactgcatggtgaaagagccagagatgatatgtaaatgaatgagtgtggctgcattccaataaaactttgctgtaatcccagcactttgggaggctgaggtgggcagatcacctgaggtcaggagtttgaaaccagcctgtccaacatggtgaaaccttgtctactaaaaatacaaaaaataactgggtgtggttgcccatgcctgtagtcccagctattcaagaggctgaggcaggagaatcgcttgaaccagggaggtggaggttgcaataagccgagatcgcaccactgcactacagcctggatgacagacggagactccatctccaaccaaaccaaaccaaaccaaacaaaacaaaacacctttatttacaaaaccaggcagcaggtcagatttgctgatttccaaactagacattgttgcctactgaaattgctctctttctcaaataaagacccaagactcacaaagtttagagaggtacataaaacataatagcaccaaccagtggctttgtcctggaagtcataggaaagattgaatgaaaattgaaatggctatgccttttaatgtgagcctgtctgccaactgaaatcccttcccatactgccagggatatagtgccagaatctggaaaaatgttgaccctgatcaatgctccccaatcaatcttcatttactcctcctttttctcagtgtgggacttagggtcagtattttcagaaatgtattcgctcttatcttagtgacccctgacaattttcagagctcttcattcctcctctgttaggctacccacagggtcttataagaattccccaaagtgcgctgcctggacctctgtaatccatgctcgaggaccctccctccagctcaggaaactctagccctcttttctggttttcctatcttattccctactgggctgacctaaaccttcatgactcctgtccacatctcaaaagcatcctcccattaccacctccttgctgctcatcaccttccttctccgcaggttggtaaccttgccccctttcagcagataataatagtatttccatgcatttgtgttgcactttatgtacaatggacatcgatctacatccagcatctccttgtcctccctgcagccctgttcctcttccagagttgaaagccgttaagagagttgcctaggttcagccagcaagtaggtaacagagctgcaattagaacctggtcttgtcgtctcatgggcattaaatacaaataccaactcttctccctttcctcttccccacccttgtgtcagttgtttcccaaatcctcagataatcaagttagtttctttcttattcccatttaattaatttttttttttgagacggagtctcactctactgcccaggccaggctggagtgcagtagcacgatcttggctcactgcaacctccgcctcttgggttcaagagattctcctgcctcagcctcccaagtagctgggattacaggcacacgccaccacacctggctaatttttgtatttttagtagagataggatttcaccatatgggtcaggctggtctcaaacacccgacttcagttgagtcacctgcctcggcctcctaaagtgctgagattaaggcatgagccactgtgcctggcctttaattaagtttttaattaaaaattatttattttcattgtagaaaatgtatgtgactaacaatttgctgccttaaccatttttaagtgtacagttcagtggcattaagtgcattcgcattgtgccactatcgccaccatccacctccagaacatttttattgtcctgaaatgaagctctgtgcacattacatactaaccccccagactgccttcccataagcccctgcaaccaccattctgctttctgtctctgtgagtttgactactctacctacctcatgtaattgaaatcatactatacttgtcctttggtaactggcttctttttcttagcatagagtcctcaaggttcatccgtgttgtagcatgtgtcagaatgttctaccttttaaggctaaataacgctccattgcgtgtatttaccacattttatgtatccattcacctgtgggtggacactaggtttgcttccacctcttggctattgtgaatgatgctgctataaccatgggtataaaaatatccatttgaatccgagcttttgattccttttggtatgagtgtatatacccagaagtagaattgctggatcatatggtaattctatgtttaatttttttttttttgaggcggactctcgctctgtttcccaggctggagtgcactggtgctatctcggttcactgcaacttctgccgcctgggttcaagtgattctcctgcctcagcctcctgagtagctgggatcacaggtgtgcgccaccaggcccagctaatttttgtatttttagtagagacagggtttcaccatgttacccaggctggtcttgaactcctgacctcaggtgatctgcctgcctcggcctcccaaagttctgggattcgaggcatgagccactgtgcccagcctatgtttaatttttggaggaacccattctcatgtgaggatcccattcactttccacagtggctgcaccattttacaatcccatcagtgatctaggagggttctagtctctttatatcctcaccaaaattggttgttttctgttttcttgataatagttatcttatcctaaagtgaaaactggattcctatgtacttttatactagtcctcgttacattgatccaagtagtttgtttagttttctgcccccctcatgaggctgggcatccctgtcagtacaagcatccctgccttctccttggtagcccagcacctggtgttcactgaatagatgcattctttataattcctgggacattcccagtttattggaaaagctgaggctgcttcgccaaatctccccaactctactcagctctactcaaagtgcctctgtgttgttcctctcttccttcctcccatttctggggaggtagtctcccagctacctcccatcaaagcaaattgcttccacgataataccttgaagtcccatgatgccgggaaatccagcgcttcagtggtctactgtgaatgtgggtcccttccacaccagtttatttttgctgcctgtttctgctgacactcagctccaagttcattgctgggcacattgtacaagatgttgagatggaaatcctgaggcatcaccaccatgagagcagctgggttaggcgttaaagccgatatttctgtcaccattttctggcatcgctggattgccccaggagcaatcaggtgcaaagcctgcttgcaaagttccagggttaagctgccagaggtcttggctgtcacccccttcctcccgcagccaggcccagtgccaagttccagaggccctgcccaggcagctccacccagagcttcagagctagagcttcaggcctaactgcctctctagccatgacctcctactggagctggggtccagcactcctaagctgccaagatgtctttaaagatgtgcaaagccaggtataagcaagcaagaggaatatggcgcctgccttcagggagcctaaagtggggagaggctttgggaggctgaggcgggcggatcatgaggtcaggagatcgagaccatcctggctaacatggtgaaaccccatctccactcaaaaatacaaaaaattagccagacgtggtgggagccacctgtagtcccagctacttgggaggctgaggcaggagaatggcgtgaacccgggagacagagcttgcagtgagctgagatcacgccactgcactccagcctgggcgacagagcaagtctccgtctcaaaaaaaaaaaaaaatggggagagggaggaagaggaaagacagtggaaaagcagacatgaactaatcatgtaaattaacatgtaaatatgacagagatgagagatcagcagccagaggtgaaggaccatgatctatgagaatgtgataaagagggcactgaccaaggcttccctgaggctctgctgttggaactgagattcaaaggatgggcaggcgaggccagggaaaggggtgtgaagaggctcccaggtaaggcaggagtgtatgaaagcactgatggtggtagatggccctgccgtgtggctgggacagagaggaggaaggggcaaagaatcgtgctaacatctttcttctaggagtgttgggaagctgttggagagttttaatcagtaggggatgtgatccctattttattttttattttttaaattttttaaaaaattttttatttggctaggcgcaatggctcatgcctgtaatcccagcacttttggaggccgaggcgggcagatcaagaggtcaggagatcaagaccagcctgaccaacatggtgaaacaccgtctctactaaaaatacaaaaactagccaggcgtggtggtgcgtgcctgtaatcccagctactcgggtggctgaggcaggagaaccgcttgaacccgggaggcagaggttgtggtgagctgaggtcacgccactgcactccagcctgggtgacagagcaagattccatctcaaaaaaaaatttttttttttaattttactttaagttctgggatacatttgacccagaaatcccattactgagtatacacccaaaggattataaatcattctactataaagacacatgcatacatatgtttattgcagcactatttacaatagcaaagacttggaacccacccaagcaatccatatttttttaaggaggctgctgtacagagaacagattggaaggggctgagatcagaggggagtgtggcaaacagcaagcacagttgcagctgagctgataggaggaaggtgaggacagtaaagacacctctctttccacagaggtggatcaatttgagagcctgcaggggagtgaagtcaacagaactccgtggtggatgcaatgtgggatgagggaaagggaaggggttattgtggactaccagctttctgttttgcaaagctgggtgctaatggtgactcctgagacacttatcatcatatctaccctcttaataaagttttaagcacacaatacaccgtgctgtacagcatatttctagaatttattcattttgtagaactacaacttcactgtattttgatttccaaacttgatttaaaagctactagacatcataagaaattagaaaaaaacaaaacagaacacccttcagccatgtgaaccaaagagatcgggaagaacaaccaaatgagaggcatcacccaacagggctgtgagtcagaccaacatggtggactgacaaggctcatccggcagcgtggagaggagagaggggaggtagaaagaggtgagacgtggtctccaactcacactgcttgccttctctctgcagggagccactctgcccttgttttccccttccctcttctggaatgttctatccgagatcttcacgtggctgcctcctcttcattcaggtctgagcacaaatgctgcctctccagagaggcctcctacagccagaatcttaagtagcccccgctcgtctctctccttcacccagtttctcggcttcacagtcctcatcactctccgacagcatcttcctcatttgatggtgtccttgtttgtggcctgtctgctcctggcaggggaaagttctagaatgcaggaacttttgtctgttttgttcacacccttcctctctccagggcccagctcagcactgaggccgtgtgctccggtgctccatagctactcactgagtggatgaatggaacagtgtggtctttcagaggccttatgggagaaagctttgtaagccatcccatgcctttcccacatcggcatcagcctcaagccctggccaccccttcctcctccagactgagcagccactcctcattctccagcagctcatgtgggctccacccacacctaccttggcctgtctcttctcacacacacaggctctcccaggggccagccccgctccctttcatctgtttgttggggtgaacctgaaagcagctgctctggccttgaccatgggtcatgcctggtgccagttgctagtctggtttccctgcctgtcccagaaagcagccacgccctctcccctgagggatggcaattcctgcaggcacgttccactggcctcttcttccctcttacccgtgcataggcaccaggggagtttggcaattgctcccagaattatttacttgaagttcttacctgacttttgtgaggttcttacttggattctgagcaaaattctaagtaaaaatgtgcacgtgcaaattagtctgggtcttaagaggatctctaataattacagtaatgttacgggtaagaccctgcacttggttgccaaaatgttgtagcctttgtttgaaatcagatatctatgtcctacccgaaacaatctatatatggttttacatgttcaaatgtaaagctatttttatcgatgatttgggaattcttgcattattgttgtagcctgaaattctctcttcttctgacaaagataataacaatatctgcattttactgaatgcctactgttttagttagttcaggctgctgttacaaagtgctatggactgagtggcttatattatgggcaacagtcatctatttctcacatttctggaggctggaagttcaagatcagggagccagcttggctggagtttggtgagggccctcttccaggttgtagtaagttactcagggtcaaacagctgggaagccctgagggggtgtgagacctggtgggccgcctccagagtcgactctttttatttttttgaggcagagtctcactctgttgcccaggctggagtgcggtggtgtgatctcagctcactgcaacctctgcctcccaggttcaagtgattctcctgcctcagcctcccgagtagctgggattacaggtgcacaccaccacacccagctaatttttgtatttttagtagagatggggtttcaccatgttggccaggatggtgtcaatctcctgacctcgtgatccaccagcctcggcctcctaaagtgctgggattacaggtgtgagccaccacgcctggcccagagtcaactcttaaacatacatgatgctgtacatttggtaaggttaggtaatcttaattttgacaaccgcagagattgagacctggaagagagagagagagcggtgtctcctccaatacaattcctcctcaccaccctctttcacccacccctgcctcagctcttagaaggggtgggccagcctgagaggccactgagaaagctgggtgccctgtgtgaaccccactcttccctgtccaccacctggatgtctagtgtgagaaagttcctgcagcctcagagataggaggggaagaggactggaaccatcaaagtcatgatgctttgacttttttctctattttctctttccttagagactggaggaatgctttgaaatagatgacagccaaatataaaatgtcattgattcagaacttacttatgagagtctttgctctaagtatatcagttcaggacctaatcaaatcatattcaaaactcagaagaagaaaataacttctcccagtcatgtcacctaagtaggaattgcagttggctgcaagtaacagaccaaaaataatggtgacttaaataagataaaattttatgtttatcttctgtaagagtagcctggggttgggcagtgcagttgctccctggatgtcttgaaggtcacaggcatcttataactttctgctccaccctccttgacaatggcttttattctcaaggtcagttagtggtcccaggatggcagctgcagctccagccattgggtctgcatccaaagaagcaagggtgaagggacagcagcatccggcaggtgaagagcttgtggcagacggagagcttttttggcctccaactaaggatttccagacacatctcattggtcaactgctgtcatgagggaggctggggaatctaggaaggatcatactttagccaggcatattgctgccttcaaaaaaactagaggttttattaccaaagaagatgggggaaaaggatattcaacaggcaagtagttgtctctgacatttcctccagaaaaccagatttctggcttgggcaattggctaaatggtactgaatggtggtgttgtttcctgagacaggcgacacagaagaaggaagaggaggaattcagtctgaggcaggtcgagtatacgctgctggaggcattaaggtgaaggtttttgttgtaggcagaacaatggccccctaaagatgtccaaatccaggtccctggaatttatgagtaggttactatatatggcaaaagggactttgagttgtgattaaggggtgttatgggctgaactgcattgcccccaaattcttatattaaaatttgaatccccagcacctcagaattggactgtatttggagacagagtgtttaaagcggtcattaggttaatgttgtcatgagggtgggccctaatcaaatctgcctggtgtccctgtaagaagatgagattaaggaacagacacatactgagaaaggaccacatggacacacagggagaagacggccatctgcaagccaaacagagagccctcagaagaaaccaaacctgctgacaccttgctctccgacttctggcccacagaactgtgagaaaacaaatttctggtgtttaagccatccagtctcggcactttgtcatggcagcctgagcagactcataaaaggattttgagattgggggttatcctgggccatccaggagggcccaatgtaaggtctcaatataagtgcccaatatacagcatcacataggggtccttataaatgaaagacagaggcaggagggccggagaaaagctgtgatgacataagaacaccagccgtcttctgtggacattggctacgaagatggaaggggtctcaaaccagggactgcaggcggcctccagaagctgaaaaaagcaaggaacagattctcccctagagactccagaaggacacaaccctgcctgtacctgggctttagccctgtgagatccatgttggactactcacctccagaactgtgagaaataaatttttgttggtttaagctactaaagttatggtgttcctttttattttataatcacaataggaggctaacactgtatattcagtaggcatttagatgtatgttttgcaaagtcaccaacacgcagagaataactgaagccattgtcatggacaaaatcattcagagaattatttagaatgaggaagagacggaatctagggaagaatcttctgggagaccaacattccaggaaagggaaaaaattgcactgctgtttctttgatggctgggtctcaggacttagaagtgtagccagatggggacatgtggggagacactgatccccctaagtgccttccttagacatgacagctgcacaacacaatcgaaggctatgatggacaggtttccaaggaaacagcaaaaagcaagaccgtgaaatagaggtgtgaatagaatcaaaagggcattgctttttataggctggggttctcctactaacccacaggcagctcccagtccccaccccctccatctccccattcctttcctctcacctcccacccctacgtgaacacctatcatatctccattctagagagctggaaaggcagcctggagccagaatgacttgggcacacaccctctgtgcattctgtcctccctctgtctccatcctaactgatgatctccttgcttctctcctctggggactctcttgattgctttctgagatgagagctcatctttctcacagcatctccagttttgatgtctggtgcatggcaggtactcggggccttgaaatgctaggctaacagctactcttgagggagggatcagagaccatgtctgagaaagggatcagaggaagggaaggtccccaggccctagggaatgagataggcaaaggctgcctgaatagaatctgcttcccttctctttcaggtcttcctcccatgcaaccccacaggaaaaggacgatgattgatacttacattcctttattgattgaaaaagagcccaacatggtctacatgattatcagaggggccactggccatcactccccctcctctttgcagtcactttggtggttttgccagagagccctgctgtgcagtgggagatggtcttattttggaggtgacctttacctaaacttcgttctctttggaataggagacctggacttggagaaggcctgcaatctctctttcctgcacctgtagtccacagacgtgagcactgtcccttagccatagaggactccccccacctcccatggagaccaggggaagctgactgcacagagccagagcccagctgggctggtggagtgcctggagctctgtgcaggtctggataggaggaaacggccaataggaactggacctccttgcaggtgctaggagcacaggctcagggctctggggatgggaatgaaggtaggacctgggagggcaattgtctgccttggtttctgcggggtggggcttctttccaggagctggtgtagtagggtcaaggcccttcagtaccaagcccaaggtccttcagtgactcctctctagtcttgagagatagagggagggtcttttgagaatgaaggaacagagcaagtggcccctaaagcacctctgcctgtgggaagaccaggtgctcagcagctcttctctggagaagtggtatttggtcttttttattttttattttttgagatggagtctccatctgttgcccaggctggagtgcagtggcaccatcttggctcactgcagactctgcctccaggggtcaagcgattctcctgcttcagcctcccaagtagctgggattacaggtgcttgctaccacgccctgctaatttttgtatttttggtagagatggggtttcaccatgttggccaggctggtcttgaatgcctgacctcgagggatctgcctgcctcggcatcccacagtgctgggattacaggtgtgagcctccatgcccagcatggtattggatcttgattgcccctttgcttctaggcactccctgtgggaggtggtcttagccttatgaggggttatgaacttggcctataatgtgatgcaatgtgaacacaacctgtgtcagcaggtcctgaatcctcctgctgctcagtaagtgagcctggcccctggaacaaaggctgtatgtaccaaggccaccttgctttgacagtgtggtgattggagcccccattcctgcccgtgaccatgcccatagaatggaacctcatgcttatggcctggagctcaggatatgagagcatatgagctctggaggtagccgtgggcttatgcctctgactggtgcttataggctgagacctggggcatgtaacttacttttctaagccccatttacttaactggaaaaggtgctacaaaggtttgcatacaggggagaaaaagaacaaactaaactgtgtgaaagcccccagcacagggtctggcacagaggaggtgctcagaatgcgggcttcttcctggctggtggctccttttgtcttcccttctgggctcctggccaggaattttacccccgtcctgggcccctgcctggtgtgccctcccagcctgtctggtgacctcagctccctttccactttccccaccttgttgatgccggtgccttctgctgctccttagaggcctttagagagctgtgtggaggtggagggtatgggcgtggcctctgcaactagaccagctgggtttcaatcatgctgtcctagcttgatgtccctgtgcattacttatctcacctgtaaagtgaggatgatggtaacagtatttcaggacaggattttggaaaggattgaatgagtcaatgaataaagtgcttagatcagcttcaggcatgtagtgaacacccaataaacagtcatcatttcattcctctgctcttcagacaccaccccagaatgcctccttgccaatcgcctctgagcacccctccttcttctgtcctcccctccccaaccctaccctccaaacccccatggcacagggttgttgccacccagcagcatccccaggtacaccccctgggtagtttccttgcccacatttaatatcagacatgtttggagctctgggttttggttttctggtgccctctgatctttgagtgcaggagatagtgaggagatgggtatgagggtcaagaagggtggggggtcatgactctggcaatgttgcaggaattgaaggaggaataaaatatcctttgctctacccagacataccaccagttgctttcttatttcctttatggattgagccagctagtgcaagcagaaagtcaaggccacagtgagtttggtgggaagccaagtgtaagagagtcaggattaaaaggctggaggggcagaggaggccagcacaggagatgaggagaaggggcttagaagaaaggagacctggggagctgaactgcacctgctccttgtgcctgctcttgtcagttactggggacattgataggctgaccctggagcagctgcctgccttgccccaaaacactgattcattctggatggttctttctcgatatctctttttttggtctcaatacttggcttgtgaggatggaaagagttggaagctgctggtctctgccccatcagcatctcagagtagggtcatcagctcctacaagatgcctgaggaaccatgcacaaaatccatcctgtccattttctcccaggcagcaatctggggagaaggatgtgtggcaatggagggtggggtgcattttagatgaattaattggtggacatggtcttgaaattcctgaagagaagaatgaaaacacagcagacagtgttacatagaatacaattcaacattacattgattcctttaggcttcgggttagatcaaattctcccaaacagaatagccatggggagcatgagacaatctagtgagcctaaaacacggaagctggttctgtcctttgacccactgacgtgaaaagagtcattgcaggtgatgctttgttgcagaaatgtggagtctgacctgggctgcatttccagatcaggtgcatccgtacctcagccttccatggggtaacaggcattggcaaaaaatgtcctgcctcagtgtgaccctggaacctttccagcccacactcatgtggaggatcccagtggggatgacgatgtttggggatatttcctcatattctctttgctgagaaactagcttgagtgggcagggaatggaggcaggtactgctagagtctgcaaagtgagtccagaacctggacttctagagttgtggttatccctaaacttccttccactaagacatccatgatagcagtatccaaatgggccctcctcatatagctgtgcccaggctacaatctcctgggcagaggaaatgaggcacctggagtgtgggtttccagtgagtgatctggggcccatcccatttgctcccatttaagaatgcatcgaggaatgcaagagtaatattatagggccatcaaatctgcattcatctcagaagaagggaaatgatctgcaaggtttgtcactgaggcactaaaactacaattaacgacatagcacttgcaacactcccaagattggtcctgaccacctgtgtgcagggctagaggtgagctagagacatggccacactggcatgggtctccatgaaggctatggccatcctgggtgagcctcaacggccatgagttccccaaactctgactccgtgggtgggtcaggtaggggtggtccccatgacacaagtgctttcctccatggattttctcacaatgcagaaggaacaaggatggattctggctctgcatatggaactgccatgcaggatggggatatctggagggccatggtgactgggaaggccacaaggctgaggagtgaagagaattagctcaagacaagggtgattctggtgcaggatgctctcctctcacacctcattaccaaatgctctccaggggtctttggcctagggcagcgtggctggctccctcacaggtactgcttctgttctttcacctacgggcctcttggttgccacagggagttacagaagcacttctcagggactctttgcttgccaggccctctggaaacccacttcccgtctctaccatagacaccaggaggccctcaatgtgcctccaggagaagctgcgctaggcacttggtgaagaggtgggaagccgggaaagagagggatgaagtaaaaacatctgggaggtcagacaaatggccgtgcagtttcctaattccatcatgcttctccttccccaagctactcctgcacacgcatagcagctcctgctgcttccaatgccattctttcccctctttggtaactcttatctttccttttgtttttgggttggaggacatggcctccaggaatttctccgtcctctatcaagtctagggtagacaccgcctgtgttcccacacccacccacatttcgccagttggcttggctgcctctctcacctcgggaagcaagaagacatcagggaccgtgtcttgcccccagccagggcttatcccagaatgcgacacttaataaatgttggcttttttggtgggtgggggcagggataacagaagttggaattttctgacgtgaattccatctctagaaacctacagatcattcagatatggaacttgattctctcaattttgatcttgatggacgtgaaagggaaaacaaccttacaggatccctctgtatctttccatttagctgttctagatgcagagatagaggcaggggtaggaaagaaattagggcaacatgcattttgtccttggctaatgatcaagttcagagaagacagtggtcaatgagaaagataaggtcaagcggaaacagtgacatcccctagcctaccccactgcctctgatgtaaatattatataattaggaactaaacttcttcagctgactaacccctagagtcatgttgtcatgtccaggggcacgtgccatcttggagagtatttttcccaggcctcccttcattgttcagtctttggaatgtttgatacttgtgatcttgaaagtctgctaagggagctagggctgtcaaacccaatgggtcagagctcagccatccctccctcctctgtaaaggacctccgtgggtcagttttggttccagaagtatgcaaatgaagaatccagctctggcactcagatatgtaaacatgaggttctcccttgggcatagcccaccttcgaagaatttcccagcatgcattgcacttggcagagagagttggatgaatgatgcctggatgcaggggcagggggttagagtgaccaaagggaaggccacagccgggatccaaggaagcatcagtcagaatagagatcaagtggatacatctggcaacattcccggctgcatggagggtggagccccaagctctatcttccccacagggtcaggaagagcattttcctggatcagttttatggcaccccacagaggagacagggatgtcggatgttggtcatcagatcttctcccagtcaaggtggcagggagatgcggaaaccaccatcagcgagtcaggaagaaggacttgaggctgcgtaagaaattcgacttctgtctgtgcttctgtttctttttgatgatgggcacccacaccagcccgcacaccagcatcatgagtcccagggacaggaagccaggccctaccattttgaggatggagagactcttgtcactcagcttcaaggtgtaggccaagcaggtgatgaccacgccgaaaagcaggatggcaccgcccactgacatgataacgatgggcttgcggtagatttcccagttactcctgggggtggtggtccagacagactcgctcctggagctgatgcacagggagctggcggtctggctgggcagcaggtccttggcttctggagacttctcatcgacctctagaaccttggggagagtctccatcgtcatggttgctcaggactgggcgcctaggaccagcaatagttggaaacaagagtggagccaaaggaatcctcacacacccttcctgtactcagcatccatctctagccccgctctcagtggagggtgaacaaggtttttgtgctgaagccaaaaaagaaaatgaaatgaaattcacataaataagaaaccacccaagctggtataatttttttttcttgcaagagataaatattataacattttattcaatagcttttaatatttaaaacaaggaacagtgatgccattttagaaacaaacaagttatagttttttgtttgtttgcttgtttttttttttagatggagtctccctttgtcacccaggctggagtgcagtggccgtgacctcagctcactgcaacctccacctcccgggttcaagtgattctcctgcctcagcctcctgagtagctgtgattccaggcacctgccatgaagcctggctaatttgtgtattcttagtagagacgggtttccaccatgttggccaggctggtctcgaactcctgacctcaagttatccacctgcctcggcctcccaaagtgctgggattacaggcatgagccaccgcacccggccagctatattttgttgaatggcattttattttcagacccaaccactttctagttgtctgatcttgatggaattactcaacctctctttgtctcagttttcttatctataagatgaggataatgttacttctttcatagaattttcaaaacggtgtgagttaagggatgtaatgcattgaaataatgcctagcatatggcaaatactccataaatgatatcgtttgtctattagaagagtgatgctttacagataaattctgcatgtgtgtcctgtgccagacactgcatcaaacacttcctttgttaaattgaaacctgacaataaacctgtgaattaggcattagtcctgttttactgatgagatagtgaagcttcagagaggtgaagcaacttcttgaagatcacacgataaggaacagcctgagctcagatttgaaccctgtcactcctaccaggctatgcgtagtctggagaacaccgtttcgtgcagcctgggctttcacgtgctctgtcagcagaggacagtgatgtcacaggttcacagtgcaaccttctttttttttttgagatggagtttcactcttgttgcccaggcaggagtgcaatggcgtgatctcagctgaccgcaccctccgcctcccgggttcaaacgatcctcctgcctcagcctcctgagtagtggggattacaggcatgcaccaccacacccagttaattttgtatttttagtagagatggggtttctccatattggtcaggctggtcttgaactcctgacctcaggtgatctacctgtcttggcctcccaaagtgctgggattacaagcatgagccactgtgcctggcccccacagtgcaaccttctaagatctaaacgccacccttccctaccctccatgttaattacatcaaggccaatttccagcttcctattctcaggcctggaaaggtatggagtctcactcaattgcccaccccagggtctaatcgagagcccatctgcatagctctcagccactggggctccctcatcactgaccctgactcaggggaggtagatggtcacccatgtggagcaatttcagggctgggctgcagagaagcactgcttgcccgccaaatacttcaccagaccagtgctttctcaaattcttttcatgtccgattaaagcatttctttcttttctttctttttcttttcttttttttttttttttttttttttttgaagtggagttttgctcttgttgcccaggctggagtgcagtggtgcgatcttggctcactgcaacctccgcctcccaggttcaagccactctcctgcctcagcctcctgagtagttggaattacaggtgcccaccaccacacgcagctaatttttgtatttttagtagggacagggtttcaccatgttggtcaggctggtcttgaactcctgacctcaggtgatccaccctccttagcctcccaaagtgctgggattacaggtgtgagccaccgcacccagcctagattaaagcctttcatttcataatcagaaatgtgggttcaaggcaaaggtctatatatttacaacaagataataagatgtaaatgactgatattaggtactttcctgaggataggttctgtttgagagagcccaggttccctgcctggaggtttcacaaagttactgccctgattcatctttcaaatgtctccaaggtgtctgtacattgctttgtacccaagagattttacacatctttaattgaatgagtaagtaaatgaacaactctctctcccttctttcccttcctcttccttccactggttgctaaggacaaacacaggacctgctccacttatatagaaaccacttacacacttatttatcttctagcaggagcctggtgcctcccctgcagtaagctcaggcggttgctgctctctgggacagagcccacaggctctctcctcctgtaccccgagtcctcaagctctctggctgttctctgagggtcccttgcctgcttgggatgactttccttaagcagctctccgaggcttctgctctttctgcctcttcagatgaagaaggagaccttggcctctggaccttggcttctaccctctttcctggccaagaatcctgcgattcctcctctggcttcttcttctgtttcctgttgggctactcaacgccccactcatgtcagcatttacaaatatctctatttatgagtgggatgtgggagatttctttccatagcaaaaaaattgtattggggaaggtgggctattcatcctggtcaccatgaaaccttggtcaagaggaaggggcaggttgcagataaatgtaacatgtatcagggcttgggagccaccagctccagacacatgttacacagagaggagtcctttactgaatgcgttctccttcaatccttccgacgacgtcaatttcagcggagtccctccaacctgttcattccaaccctcactgctcaggcctgaacttttctgaactagtgtcttccctgaccccaagaataatgattccattctctagaacaagcagttacagatccctcaccattaacagggggaaataggagttgtaaccaaggccttcggaatttggccttggtaatgttacagtttggatctctgcttcctaagactctgaaaatattacaaggtgcttttgtaactgtaggcacccagtgtgtgcttccctttggagcctgtggtatatttgcataagcaaagtagccatttaaaaggtgatttttttccccctgtgggcttgggggtagggatgggttcataaagctgttaggagaccttgtgctgcttactgcaacctggtctcatatgaggatgtttgatcatcttcagcagaatttatttttctcagtagtcatttcgatcccgtttccgtgaagacatggggcgatatgatggctgtttcctgaggctggaaaggttgtgatgaaggaattaaatgcagtgattctcagtggtgccagagaagatagctggggctgggcaggggaagggcttgctcctgggagctgccatctgggagtgagggggctcaggaacaggaagtgttgaactggaggctggggccactgcagggacattggactgtagattctgagagaggaaaatgggccttgctggaagtaactaagaccttctttctggctctgcaacgcggtcgctagttcagtctcattttctaggggcagagactgaggcccagtggggtttaggagcttggcgaactataccaacccccacatcaggccaaggtcttcggcctcaaagctccttgcactgcacagcagctagtctggatgggtcccaaaggttcctcaactacaagaatcttgagattatcactttgtggctccatcctgtagtaaaataatctctcaatgaatacagaatgacttagattcataatcccctaacattgacccactacgtgacgtgagaaagaagaattctgttgtaagtttttcataatgttacatttattcagttcgaaggactattttttattctgagatcataatgtaatggagtggagtccttccttggcattagaatagtcttcattttatgaaataattatgatggaagaggatcattggttttgttagtaactgctcagaaaaaaattgtccactatgtagatgtctgtctgtctatctatctatctatctatctatctatctatctatctatctatcatcatcatctatctgcaatggtccatgaaatcccaaagaaaagcaactattcatttgttgggagggaggatgtgtctttgggagagtgaatgggcagggaggcacttctaggcaatgactgaaagagaagcagttctcttcccctgagcagagggaatgcctaccctcctctccctcccacgctactctctgtaactgtgaccaggcaaaaggcaaggagcatctataaacagaagcaggcaggcagggcagggctgtgagtggaactctgtactgggaagaattaagcctacttattcacagttccagcaagtcactaaacttacttgcagaagctgcttgtgatggaaagacccaggtctttggcatcagagtgaccacaatttgaacacagtttgccacttacatgctgtgggacctcggtcaggttacttcagcccctgagccttacgagccccatataaaacagggataatggagtgtctacctcatagggttgcggtacagtcaaatttcaaataacactgctatattgtctgacacattctacgtgttcaggaaatggccttggttgccattgcaattattttctttctgggtctctgtttttccatttataaaatgaaggagttttcttagctatttcagataagtctataggtaatgaatcagcttgaaatctgaaaattgaggttttcagaaaatcaccaattcatgggctgtaggagttttataacattttattaaagccccaataagattccattttttctgtataccagggctttttaacaatggcactgttggcattgtggattggaaaatggattgctgtggcagactataggattgtaggatgtttgtattgtaggatagttagcaacattcctggtctctacccactagatgccaacagtacctcttcctccctgttgttatcatcacaataaaatatatctccagacattgcaaaggtcccctggggtaggcaagatcaatgtggtggatcaaaggctgctctggccagcctttcctcctgcctagcttgaaaattcaggatagaggctgggcttcctcatcttctaccccatggcacctggctcacagcctggcacttggcagttgctcagaggatgtggcccagatgctgcagctctgtcggggacaaggtaacactcagggggctggtccagtgagaaccacccttttccgcttcaattaagttactggtagtttggtttgtgtgattcaggagatccttcactcactgtagggagttgaattgtggcccccaaaagatatgtctacccagaacctcagaatgtgaccttatttggaataagggtcactgcagatacaatcaagataaggatcttgagattaaaacatcctgagtgagagtgggttctaaatccaatgattggcatcttccttctaagagaagggagaagggaatttgacacacagaggggaaggctatgtgcagaggagagatggaaggaatgtttctacaaaccaaggcatgccaagggttgctcgaggctgggagagaggcaaggagtgaattctccctctgagcctctggaaagacccaaccccactaacaccttaattttagacttctggcctctaagaatgtgagaccttcaatttctgttgtttcaagtcaccaagtctgtggcaatttgtcatggcagccctaaaaaataagtatactcagtttcctttaaggtcctgatgccccagactgggcaaggactgaggccccagagaggatgggcctatggaggagcaggagaagcctggagttgcagggcctcctggactcacctcagatttgaatgtcagctcgcctgcagggcagcaactggagaagggcggatgggtccttctcccctggaggccagtttggagcttcagaaggctgagttagtgggtggggacttaattacagtacacaaccaagctgagcaggctgcaggctggcaccaagaaacagtgccagtctgggactatacagcaacgagaagccagacagagaaagaatgcatgcgatgtgatctcatttccgtaaaattcaaatatgtgtaaaacagtctatgctatgagagcttaggatagtggctgcctttggtgggggtagtgactgaaatggggacttttgaggtgctggcaacgttctgattctttttttttttgagtcggagttttgctcttgttgcccaggctggagtgcaatggcacgatctcggctcaccgcaaccgccgcctcctgggttcaagtgattctcctgcctcagcctcccaagtagctgggattacaggcatgtgccaccatacccagctaattttgtattttttagtagagatggggtttctctatgttggtcaggctggtctcgaactcccaacctcacgtgatccgcccacctcagcctcccaaaatgctgggattacaggcgtgagccaccacacctggctatgttctgattcctgacctagcagctggctacaagggtgtgtactactggcacagtacacttgagttgtgaccgtttttgtgtgtgtgcaatctatgtcaataaaatgcttaaacaaagacaattaaaagatataactaaatgcaatacgttccttcctttggattctgattagaacaagccaattgtacaaaggcactggggataattagggaagtttgaacatggacttggatacgtctcagcctcagtgtgaaccatgattcctttcccttttccataagcagatttatccctagagctctgtgaccttccatcccccaaacagcactggttttccctaggtagttgctgacctctaaggtcaaatcaactgcatagacccttagtgctaagaggatgagagggggtctggggatccacctgacaggcccagaaccccggagtgatgatccctgactgtataacttggggcccacttcctggtttaaagaaataacttattcacctcttacatggatatgtggtagggacagggatgccagacaagaaaagggaagggaagagggtggaaaaaacacagaggacaattgactttcaacaaatgcatcaaagcaattcaacgtggaaaggaaagtcatttcaacaaatggtgctggaacaactggatattcacatggaaaaaagaatgaaacttgatcccacttgacgtcatcaacaaaaactagagctggatcctgggtctaacctaaatgtaaaaggtaaaactataaagatttttggggaaaccacaggagaaaaatctttgtgacctggggacaggcatagattttgtagacaagatagagacagaaaaaaaaatcaataaaatagatatcatcaaaatttaaaatgcctgctcattagatgacaccatgaaggaaatgaataggcaaactctgaactgtgacaaaatatttacaaaatatgtatctgggctgtgcacagtcgttcatacctgcaatctaatcctagcactttgaaaggccgaggcagcagatcacttgaggtcaggagttcgagaccagcctggccaacatggtgaaactctgtctctgctaaaaatacaaaaaatcagctgggtgtggtggtgcacgcctataatcccagcaactcgggaggctgaggcatgagaatcacttgaaactggcagatggaagttgcagtgagccgagatctcgccactgcactccagcctgggcaatggggcgagattccatctcaaaaaaaaaaaagtatctgtcaatgctacatatgattaatagacaaagagcccagttaaaatgggccaaatgtttaaataaacattacatataacaagtgaacaaggaacccaggaaaaagtgcttgacattgatgtttaacaggaaaatacaaattaaagccacaacgagacatcaccacacatgcactacaatagataaaatgggaaaatctcacaataccgtaggttggtgtgaacgtggaacaacccgagctggtgggaatgtaaaatcggttgttttttacaaagttaaatatacatctaccctttgacccagcagttccacttccaaatgtttatttgtcccagagaaatgaaaaggcatgtctgcaaaaagacttctttaagaatagtcataaaagctttattcataatagcaaaaataaaaaagaaaaaaaagaaaaagaaaaagaaaacaacccaaatgtccctcaacagaagaaaggataaatggttgtataatcacacaatggaatgttactaagcagtagaaaggagctaacttctgaagcgcacaacagcatggatgagccacacagacatgctgggtggaagagatcggatatgaaagagtacctatatggcatgtttccatctacctggcattctgaagccagctaagaactaattaaggtggcaaagctcagaaaattgttgtggggcttgaggaggaaccaactggaatatacacgaggaaatttcccagggtcgatggacatgttctatgcagtgacattggtggggtttgcatgagggacccatttgtcaatatggtgctgttagatctgtgcatttctttttctttttctttttttgagacagagttttgctctgttgcccaggctggagagcaatggcgagatctcagctcacagcaacctctgcctcccgggttcacgccattctcctgcctcagcctcccgagtagctgggactacaggcaccgccaccatgcctggctaattttttctatttttagtagagatggggcttcaccgtgttagccaggatggtctcaatctcctgacctcatgatctgcctgccttggcctcccaaagtgctgggattacagacgtgagccactgcgcccagcgttgtttgttttttttttttttttaactacagaaggttagaacctgactagcaccgctttaccaagtcactggtcctgttccttcccacccggtggttgtaaaaatctccctttgatattacagccaggtgttaggatggaagtagctcacaaggtggcatggaggcagctgtgaaggggcaaaggcaggacacactgaccaactcctccctgcctccattctttggcctaagtgaccgctcacctcgccaaggcaggcttccttctgctggccgaagttcctacaaaaatctccaatgtacctcagctgcttctccaaagccaaagaagccatgcggctggggagggcaggtgctttttatacaataataaaaactaccatttatcaaatgcttagtgtgtggtgggagccacgctaaatgctttgtctgcattgcctcatttcatcctcccacccagtcactcctatggggaagctatattcttgccccactttgcaggtgaggaaactgaggatcagaaaggtataagtgacttgcccaagatgactcacagatgaggagagcatctggattggaatgtgagttttgcagccagcctggcccagactctgtgttcaagtctattccgcccctccttggggcggttttaacgtttattttcaaattatgggaaaagcaagtggggaggatgcccaaagtgggacatagtgaacagaactgcagccttggctgaggagataggcctaggactgttggttagagctgccaaggacgccggggtccccgagctggggccagcaagcagcaagaggccagcaaggggcctgtggcacagtggccttaaagtcaccactgtcaccatgccacaaatccaacgtaagatgcctggcatgtgccactttcttcgcctggggagtctcttttaatcctctgctttaggagggtaatactattatcattcccattttgcagctaggagcacaggctcagagctgccagcctccaaatcctgatttttttttttttttttgagatggagtttcgctcttttgcccaggctagagtgaagtggtgtgatcttagctcactgcaacctccacctcccaggttcaagctattctcctgcctcagcctcctgagtagctgggattacaggtgcatgccaccacgcctgcctaatttttgaatttttagtagagacgggattttgccatgttggccaggctggcctcgaactcctgacctcaggtgatccacctccctcagcttcccaaagtgctaggattacaggcgtgagctactgcacccggccaatcctgctcttttatttatgctttctcaaggagagggccctgcctttttttcttcttgttttcttcaccgccttccttgcattctaccaccctacacctgtacatctccacctctgaactcactccccagccttttcctggtgctgtcctccttcgaacgtgctgaaatacagttggtattaagagggttgtcagatttagagaataaaactacaaggtgtccagttacagttcagcctcagatcaacaacggatagtttttttcatgtaagaatgttccagtattgcatgggaccaacgcatgcaaaaaatgtatttgttgtttgacaaattcaaattgaactgggcatctcgcaatacatctggcacccctaatattgtaagagatcccgctgtgctgctgtgcttgggcctggagttatctggcccttcctgagcttctgcccctcaggccccaccatctagagagctctgatagcacctgggctgttctggaagttgcaagagctgaaagcagaggagagaggcacacattacctcactgctgggaggctgggcccagcgaggggagtctgggggagaagcggggaaggcaggatggaagtggtgggaataacaccatgtattattcctgtggaagacccagagtggtaagaagtggagggtcctcctgtttccctcacggagtccccattaaggccccacccagctccagcttgccagtggtcatccccacggtcccttatcttctctggcggtgctgtcttcccctcaccaggacattcagttggtgactgtccacccctctgataaggtgagtgggggccaagtgtctgggctaatagaagctagagggtttctgagtaagccgctgctgtcaccatggccatggccacccatctgtcacctgctcatagcgcttctaggaagggaagtttcccaaaggtcacagtcaacctagagggtgccacccacctcccttgttgggccacccggctggtgcccagaccctggccagtgacagggtagaaaaatagctcgggcgattgcgtgtgtgaccacggctggctttacccggatgcagggttctcacggcacacagttgcctgactgagccacgtctttgtccgtgtttgcatgtgcctgccttgttccccctgtctgagataaaactcccgaggcagccaacgcactccaccttgtttttctggcacctgccccagacacctgccacagctgcaggaggaagacattggcagctgcagaggtctgacacagggtgctcaggaggacggctggggtccgagattccacccatgtactctggggtctgggggtggccttgcactttcctgtctggcttttttgcttcttccacttagatttgggaggagagtccctgcccagcccttcccacaatggctgctaagagtgaaggctggatgctatagacgcaggactgaagcagctctctgcccacaaattcccttcttcccagtacacagcaaggggcggccccccttcctctggccaccactgtctgccaagaccctcagcaggcagtgcctccaggctgacttcaccccctcccagggcatagcccccttttctccgcttgttgttcatgcttgccttccaaccccagtttaaagacaacacgctccaaagcaaagttaaaatctgctccttccttcagcgagatggaaggaagggcagaaggaaacattccctccttacttactgtcctcgatgtcccaggggaggatgggggacctgggaatcacttggtgctcgtgcaaggaggaagccggcaatgagtttctgctcaagtccatgccagccagagaaagccaccctgaccacgtccagaagtcagtgtgttgtgaatcccagcaactgagcaggctccagcagggatggatgagctcaccaggcaatggcctaatgggttaactctttgtgagctgctggcatgggtcctcggactgtggctttctcagctctgctcagccacaattagatgaatcttgtgaaaaattcatgatgcttctctgcagtctgtcttcaagtttcatggaggcgtgcgttccgttggtgcctgggcagggcagcttctcctgacccaggctcagaaatcagaggacctggagtttctgggttggtggaggtgtgtagtggccatggtggtggggatgagttgccaaagagtggatcagaccctccggctgactcaggctacactggctctgttcagtgcaggccttaataatttgatctgggaactctctgtgttctggatgttggagggggcacatgcagacttagaaaacatccttggttgcaagatggcagggacacttcttggaactttccaatgcacgggtgggcaccctatgttacaaactgccaggagcccacaacacgacttacctccatcccaggcctgacatctcaaatagaggcaaaagagcttgttccccatcgctcttccaatcattcctcatggtgccctgttgctttttatgggatgcctgctgccacaatgatgagaagagaatgatgcaaatcagtgcaaggaggatgaaaaggttttctcctctataaacctttaccagactgtgcttcgggaagctgggtgtgagctgttgagtggccagttctcaagatgctgacggatacactgaggtcagcaaaattgcctatgattctggaaggcatgctggctcctgccctggcccacactaacctgagaacgtgggcagctgttgttcctcaggataactggtgggtgggcatccttgctactgggaacagtaccctgaggggcttcctctgtggtctgccgggagggctttcctaggagccatccaaggaagctgctgtcaaggcaggtatgagactctcccatatttggcatcttgagttcctcatctgtgcaatgagcaggagattctgagcctagaaggctctgtagaggttgctgtgtgatccatgcctagagaagcagagagctaggaggatgagcctgtcccctgagctgctgtgagggatcaggctgagtacgccctctgtcctctgtgaagatgagcgtctctgctcagggcaatgagcagggagaggcctgccttgagtgtccaggggaacttgactttgaaggtttttgaggatgtgagttgctttgccttaggtgcctctgactttatactcaaatcagtttgtaaaaccaagtggcctggctcgcagaggaaccctagagtgaattattttgcaatgcaaataatcaaatgatttatttatttatttttacaaagttcgggctattcccccaccctctgcagggcacggcagtgtggcagagtaataccatcctaagttaaacccttattcatcactccctccatgtcaggcactcttctaagcactttatatatatagcaattcacttatttcccatacaactccatgaggtagccatgtgaggtatattgctatctctgtatttggccttggacgaattacttctctgggccttaatttcctcatgtattcattgagtgggatcattactacatcacagagcttttatgaagattaaatgagaaaatgctcatagcaagtgcttaaagaatatatacataatatatatgcacataatgcacatgtgtataagtacatatttaaatataaatgtaaattggaggggcagcaagcatcagaggagaacatgtccggggtagaagctgttctgtctgcagacccccttcctagcaggacagatgaggaggcatgaggagccatcatggtccctgggcagctgactccagtgtcccgggatgaagaggccgctactgcagctgtggtgttgaagggaatgggagcagggatggtcactgcctggggatggctcttagcctcttatccacagtgccctaactctccaccctgtagctgctcctgctcagcgctgtgccccctcacctggccagtccagtgttgcacgagacagtggtaaggtaggatgaccagccatccaggctcactgggtactgatggatttcctgaaatgtgggactttcagtgctaaaaccatgaaagttccaagcaaaccagatgaattggtttccttagtaaacacttttgggcagtggcatgtcatttggaacatccgtccctgtgcacgtgggctgtctccttctggaatgttctttctgtcaatctttatgtacatatgtatgtatgtatttatttttgagacaaggtctcactcctgtttcccaggctggagtgcattggcgtgatcttggctcactgcagccttgactcccagatgcaaatgattctccctcctcagcctcccagtagctgagattatagatgtgcaccaccatgcctggctaatttttttgtttgtattttttttgtagagatggggtttcaccatgttgtccaggctggtcttgaactcctgggctcaagcaatctgcccgcctcagcctcccaaagtgctggaattacaggcgtgagccaccgcgcctagcccatcttcatttagctgacgcagtcagtctggccttggccctgcacagcctctgggccttcgctcttctgctctattatacttcttgatgactgtctgtctgtcccctacttgcatcccctaaactccttggaatagttttttttttttttaataaaaagtgcttattacgaaaaattttaaacacacacacgtgcgcacgttacctaatgaacttccacaatccagcttcaacaattatcaacgttcattctttttcatatgtctcccttgtgtatgtacagttgacccttgagaacaacacaagtttgaacttcgagggtccacttatatgttggcaatttttcttctttgagatagggtctgcctgtcttccaggctggagtgcagtggcactatcccagctcactgcagcctcgagttcctgggctcaagcgatcctcccaccttagcctcctgagtaactaggaacacaggcacatgccaccatgtctggctaacttttaatttttctgtagagatggtgtcttgctatgttgcccaggctggtcttgaacttccatctttaagcgatcctcctgcctgggcttcccacagtgctgagattacaaggaatgagccaccatgcctggcctggatatttcttccataaatatattgacttttttgagacttgtgacgatttgaagaaacctacatacaaactgcatagcctagaaatattgaaaaaattaagaaaaaagatagatatgtcataaatgcataaaatatgagtagatactggctgggcaccatggctcacttgggaggccgaggtgggtggatcacgaagtcaggagattgagaccatcctggctcacacagtgaaaccccatctctactaaaaatacaaaaaaaaaaaaaaattagccaggcgtgctggcaggcccctgtagtcccacctacttggaaggctgagtcaggagaatggtgtgaacccgggaggtggaggttgcagtgagccgagatcacaccactgctctccagcctgggcaacagagcaagactccatctcaaaaaaaaaatatatatatatatgagtagatactgttgcatttatatgttaattgactcttcatcttatcagtaaggcctctggtcaatgataggatattaataattaagtttgggggagtcaaaacttacatatgacgtttttactgcacagaggttggcactcctaacccccacattggtcaagatactttatttcacttagtattttaaagttaattctatacgtctcttcttcagtaaagccttgcaaatagagagttgtgtttccctaacagatgacctccttccttcttttttgaaataataaccacagtgccatcataaccatacatgaagttgaagcattcttaaagtgaatacccattccacattcacattcccttgattgtctcaaaacaacgttgtttttttttttttttttgcttttgaaacagggtcttgctttgttgcccaagctggaatgcagtggtgcaattatggctcactgcagcctggatttcctgggctcaagagagtcttccatctcagcctcccgagtagctggtatcacaagcacccgccaccacgcctggctaatttttaaatttttttgtagagagagtctcactttgttgcccaggctggtctcgaactcccggcttcaagcgatcctcctgccttggcctcccgaagtgctggggttacagttgtgagccaccgtgcccagcctcgaaaccacccttttagagtcaggtttcttcaaagcaggatcccagcaagttccagtgattacttttagtaggtctgcctccagcacttcttttggcctctaacagcctttccctcttctattcataacatttatttattgaagacacaggacttctgtcttagagaacttccctcattccagatttggctgcctgcttcctcacggtgccatttatcacttgcctgcattttgcaagggccgtgtctcaatttccactgtggccctggatcctagtacaatgccttggcccaggaggggtgcccagtcaatggtgaataaggagtcacatgaatattcataaggtacctggcaatgcatagagggctttggcccacatgccgttcggccaggagctacattttctgtttgcttctcccttgtgatgctggaactggttactgagccaaaagactctgaatgccatggtcatttccaaaatccccttctaactgagtgctcccattttcttttcttttcttttcttttcttttcttttttctttctttctttttttttttttttgagacagagtcttgctctgtctcccgggctggagtatagtggcgcaatctcggctcactgcaacctccgcctcccaggtcaagcgattctcctgcctcagcctcctgagtagctgggactacaggtgcctgccaccatgcccggctaattttttgtagttttagcagagatggggtttcatcatgttggccaggatggtctcgatctcctacctcgtgatccacccgcctcaggcctcccaaaatgctgggattacaggcgtgagccaccgtgcccggccagtactctcattttctaagggataataagttaatatttaaaattatattttctcttttttttcctctttcctcctcttctcctgtgccccacttcctacttagctctttaggaatgcagttataaccttttaccttcccttcaccagacactgcctatagggtaagcttatctaactgtgtgcgtatttaaaagctccagagtggaaacctttcccaccaggagtttgccttgacagacaaaagccaatttacaaccaaaagtatgcctgctacaaaactctctctcatctgaagagcacctcgagacaaggccactttacaacctagttctgcctgcgatggcaccaacttgaccacttctggtaaggcagccctgtagataaggcacatatagataaggcactggaagttacgcagacccccacctgcttgtttcctcccctgcataccacgcgtgcaaaatccccttctaaaaacccctgctttctcttccaaaagagaagccgtacccttaaggcaggaagcctgtgcttcttcccctgagctagctttggaacaaagtcactttctttgtagcagatctcgggagcaactgaacttgcaacccagctacactctccctcccgcccacgccaaggcaggggaatgagcaaataggaaccttcagggtaacttcagaggaggcgactgccctgagcaggagtttccacaggatcctgggtatctcttgccaatgccagtgcagagggggagtgaggttctaaccatgggaaggagtccggggtgggctgtcagcactggctgtcggtgacaagcctaacaaagaggtgcctatgttgacatccttgtcttccactgtttgttttggtgtctttttattagtctaataaccattaggtagctcattgtcctaaccaaacacacagaaagctgaaagaaaacaccaccaactttgggaaactattggaaactgtgctcagagggagtcccagccccctcccaaactgcgcccaagagcagagcaagatgcaaagccaggggaagtaaggagggaagcaggctgggagggaggggctccagccccagggttggggtggaggagacgaggccccctttgcccataagactctaggctccttccaaggagggcaagaagcctttttttttttttttttttttttttaaacccagggcccaggaaagttatgcaaagcaattactcaacttaggcagcccagggagggaccaccatcttccaactgctccacctcccactacgtttgtctttgcctcctttcccttcccatcagggttcatgaccaaggagacgcaattctgtgagcctaagtctctgctggtctggtcctcttggctctcttgagagacccaagtacaggtgacttccctgactctggctgggctccgtaagctgtcttgaggctacgcagcgtctaaggcgttatccttaacctccagctccctccggctttgcttttctctctcttcttgactcttctgaagtttttccttgttcctgtctctcttcctcctgtctgctgcagcctcacacaccagacagttctcaagatgtccttcgggggagcctccaggaaggtctgtcccttctctttctcggtgcatataattgagcagtgacgtgggagacagcagccccctgggctctgcgccgggagccgggagcgctaaagcgagggcaattgtgtatggggaggtggggacggggagctggggacgtgaagaatgaagagactggtggagtttacaagaagtaggagtgggagtggcggaggaaggagcgtctttcttcggggaagttcccagggcaatcgttatctgctggcccctgcccctcctgggggggggggcgtcccaggaaggagctggggctgagtgggacgcggtgcccaagggcggggctgtggtcgagggcggaggtggcctcctcttggggtgtgcctgccacctagtggtgaacttggagcagtgctgctatctgaagtcgacttcaattattccttcgcgatctgtgtctggcctggtaattcacggtggactggaaattagaaaatcgaatcttacacattgctgataaatactatctcacggtaatattcattgcaatttcaaaatgtcaaataattaagacctactagtttttaaataatttaaaagactcatgtagtcatgtatgcatctcaccatcaaatattgattatataggtctcttatataccagacactgttttaggttaggcattggaaataaagagaactatacaatttatgtgaaaaaacaggcaactgaatcaacaattccaatccagaagcaaaaactcttcaatacagccatgtctgtgctgcgcaattgagaatacaaaggagaggcttggcaagacagggaaaccttctctctacaataaacaaacaaagccccccccgcccccacaaaattagccaggcatggtagcgcgcatgtgtagtcccagctacttgggggtctgaggtgggagaatactctgagcccaggaagtcgaggctgcagtgagaggagatggcaccactgcaccccagcctgagtgacagagcaagaccttgtctaaaaaagagaaaatacaaaggacgattggcatagggtggtgatgggagagacttcctcaaaagggtaatggttagtctcagcactttgggaggtcgaggtgggtggatcaactgagatcaggagctcgagaccagcctagccaacatggtgaaatcccatctctacaaaaaaaaatccaaaaattagccgggtgcggtggcacacacctgtagtcccagctactcggcaagttgaggcaggagaatcacttgaacccaggaggcaaagagtgcagtgagcagagatcccaccactgcactccagcctgagcaatgagagtgaaaccgtgtctcaaaaaaaaaaaaaaaaaaaagaaagaaacccaacaaaataaaagaaacaaatgaaggttggtggttaggatgaggcttggaggacatataggagccaaagaaaagtgatggaggtgatagaggtggtggtgatggtggtagaagtagaggtgttgatggagatgaaggtggtggtggaaatggaggtgatggtggagatggtggtggtggtggaagtggaggtgatggtggtggtggaaatgaaggtgatggtggagatggaggtggtggtggtggaaatagaggtaatggtggagatgaaggtggtggtggaaatgaaggtgatggtggagatggtgatggtggtggtggaagtggaggtgatggtggagatggtgatggtggtggtggaagcggaggtgatggtggagatggaggcggtggtggtggtggaagtggaggtgatggtggtggtggaaatgaaggtgatggtggagatggtgatggtggtggtggaagtggaggtgatggtggagatggaggcggtggtggtggaagtggaggtgatggtggagatggaggcggtggtggtggtggaagtggaggtgatggtggtggtggaaatgaaggtgatggtggagatggtgatggtggtggtggaagtggaggtgatggtggagatggaggcggtggtggtggtggaaatagaggcgatggtggagatagtggtggaggtcttggaggcagtaaagttaaaggctggaggccatgcaggctgtggttgtgaaggtagagctgacagaggtagaagtggttgcagtggtgatgaaggtggtgatgatgaggagagtcgcgattgtggtggtggttatagtgttggtgagtgtgatgatgatagcactgttgttgttggatgtgttagctttggttttggtgatggtgatgaatgtggatggtattggcagaggtgggtgtggtggtggtggtgatggtggtcatggtgtagtggtagtggtagtgagggagctgcagatggagatagaggtggaagtctgatcttcaagtcatccatagctgctgctaccacacaggtcactgctaagcctccacttgttcccatctttatggcctttccagggttggagactctcatctctacttctacccattcttggtcctcagaaatccttctactgcttccatactgcctcagggcacaaagaattgctgagcagccatcggaggtgatacgtctctagagatataaacagctccctctcattaggatctggtcacttccctgcttcttttctggaactccacttggagtaagaaatttgttcttctttgctgtactttttccaagatgcaactgagttattcatcaatatgggcctcaggccaggcagtgggttgcagggaccctgtattgggaaaacaccaatgtctgtgttttcttcttactctttgttatgtgttaagtatgcccccacccccaaattcataggttgaagctgtcgtaacccccaacgtgattgtatttgttaaagaggtaattaaggttaagtaagattataagggtcttaatccagtacgattggtgtccttagacgaagaagaggcactaggtgcatgcctacacagaggaaagccatgtgaggacacagcgataagattgctgactgcaagctcaggagaacttagaagaaaccaaccctaccagcaccttgatcttggacttccagcctccagaactgtgagaaagtaaatttctgttgtttaaatcacccagtctatggtagtttgttatgatgacccaagcagaataatgcataccatgattctcttccattctctcaactcaggacatcctttcccagtgttggggtggtggaggggaatgacatagatgttcgtggatggagagaaggccttcctgttgttaagacttttttcttagctccatcatccatgtgacatgcccttgcattctttttagtgtctgggccagtctgccatggcttttcagaaagcagggcccaagcacacctttggattcaacctgagtgggttctaaccaagaataccagtgaacacaccccatggaaggggcctcatcagtagaggttgtattccgaatacttgtgaacattttttggtctgagatgaacacagcattccctctttggagcactgtgggcattatatttgcaaaagggaataatgttaggctccttcagaaaaacaaagtggtgcaccagcatctcagctgtggaaagagctcagaccttggtaacgtttcaaagtaccatggatgtgagggacagtcagtgaccacagaaggaacttggccaaggaaaaagagacacgtagtgtcaggcaaagctcagaaaatttcagagaattagactgggaggcagaccatctcagcctggagctagcttacttttgtacttcttgcatgagacagtccacattcttactgtttaagctgctcaaaagggtgtttctgtaactacttgcagtggaaagaaatgtgtccagaatctctcaaaaccctgaataccacagtgcattggcagggcaggctttatatggccacaaacaacaataacactggaatattctattcactcattccctcaggtcatggtttcctacttgaaagcaccatggataagtccctttctgctgtttctccccaaaacaaggatatgcatcatgatttcttgaagattccaccattagtcatagacgggcctgaaaaattgtacaaattagaaggtagtaaggcaccttcactggacctctgctatatctctaagtatatattgggatggggaagggtgagtgaataattacaataataattaataagaacaagttcttttcagtccgagttgcatttaagaaaagctatgaattcttccctgatcagtccagaaatgcatctctggagctatggctattgagtgatctttgttgtaacatagttttccttaagtcagattcactgggaagaggactgcctttaagtccaatccaagggataaacagttcatcaaatataacagtttatttgtctacatgcttccttcccttctagtcagtttagcttctccagggcaagagattcagcccctgcctccctgtctctagcacatgaattcattcaagaaatgtttccccactaccaggctccaggatgcttctgttgcatgggaaatcagagacacatagtgcctgctcttcccaagcattcagactagtgagaaaggtaagcattaaataggtcattactccagtaattactcaatagtgactagaacgaagaggtacgggagctataagactataccatgggaggacctgacctagttcatagagtatcatggaggcgtcccagagcagggaccatttcaatagagacctacaagctaaggtcttggcatttggtatcctgttagcagggggaggctctgagcctgggtaagactgacttagaaaggtacttggcaggaggtcagaaaaccaggcaaaagaggctcagatgaaactggagtcataagcaggggccagagcttggtgcaccttgtagactatgatcagccataatagagtctttgtacatgttagcttccatgcatgaatgaatgaaatatcagaaaggtgtcgttccttaggtacccttgggtagccttatgtgggtttcagggtagcaacacagtggtgaaaatgttcaagcaagggtgaagaaagaagtatttctacgtaagccaaggaggagataagaatggacatgggcagattgtacacttcttgatggagcagagacaccccagggtggagatagcctgagttagatatcagtctttggtgcctatggaagtgataatgaggtaggatcaggcctacaattcacccgcctccttctcctccaagatccaattcccctcctcactttcttaagataccaacatgatctcctgagggcagggtctagggactttgccctcaggagatcatgctgcccactttagagtgccttgaacagtctcagagacagacctccctctgtgcaccagccaggaggtgctatatatacttaaccatggactattcctgagactaagacttctagcattcacctgcaatctctctttctaacagttgcaattttggtgaggtggaagggggcggcagaaatatttctatatttggtagaacagtctaggctgagataaggaaaggattccagttcgagaccagcctagccaacatggggaaaccccgtctctactaaaaatacaaaaataagctgggcgtggtgatgtgtgcctgtaatcccagctactggggaggctgaggcaggagaatcgctcaaacctgggaggcagaggttgcagtgagctgagatcacgccactgcactccagcctgggtgacagagcacgactccatctcaaaaaataaaaaataaaaaaggaaaagaaaagaaaaggattccaaaatgtcagtggcttaacataatagaaatttatttcatgctctcatagtaacctttggcatgtcttcaccttgtcaaggcaactcttttccacttgattcctcagggacccaggctccttccatttgtggctctgctctctcctatggccttgtcatttactgtctacactgatctggcaaaacagaaaagtcgggttggaagggaaaatgtttggaggagcatatgcaggtctttttgccaagcctacaagtggtatatatcacttttatttacattccatttgagagcacttagtcacatggccacacttaactgtaaagaaggaggggaaatatagtctagctctgtgctcaaagaagtgataagtagatttttgtggaaaactagcagtctctgccacattgatgaccaaaattaatatttcatagtctccctttgttttagttatctaaagctgtgtaacaaagtatcccccaaattagcagattagcacaataaacatttgttacctcacattgtctccatgtgtcaaaaatttgggaacagcttagctgatgttttcagctcagggtcactcatgaagttgtggtcaagactttgacctgggctgcaactcatctgaaggcttgcctgaggctgtggacttgcttcccaggtggctcattcctagcttcaatgggttggggacattcatgcaggttgttggcaggaggtctcagttcctgcatgtatgaacgtctccacagggctgcttgtgtggcctcacaacgtggcagcttgcttccccagaatgagtgatcctagaaagaggtcacagtatcacttatcattcaatctcggaagtcacacaccatcatttctgccacattctatttattagaagcaagtcactcagtacagtgtgcactcaagaggagaaaagttaggctccacttctcagaaggaggtttatccaagtggaaacatttaaaaattaccacgttcttaaagaaggatgtggttttgagacatagttcaggaaaatgaaacaccaggagaagttgcagttggggcttccaggagcacctcctaaatacctggcttgttttccctttacaccttctgctttcttaccgtctggactgtgagtgccacttttattgctgcagtggccctctgaggacaatgaagaagtcttgtgggtggaactgagcagtaaaaagggtgaaaacagaaataaaaggaaattggagcattgagaatattgtggagccaccaggacagcccaggaccttctactcctgaactaaatgattaaaaaaaaaatcattatctgatttaagccactgcatgtttttttggggggaggagaggatttctgtcacttacaaccaaattctacttacaaacaaatataaccaattcctaactgatgcaactgctatgtgttaggcagtcctaggcactggggaaagaaattcatgtgaaaaagtcactatcggccaggcacggtggctcatgcctgtaatcccagcactttgggaggccgaggtgggcagatcatgaagtcaggagatcgagaccatcctggcgaacacggtgaaaccccgtctctacaaaaaatacaaaaaaaaatttagccgggcatggtggcgggtgcctgtagtcccagctactagggaggctgaggcaggagaatggcttgaacgcagggggcagagcttgcagtgagccgagatcgtgccaccgcactacagcctgggagacagtgagactccgtctcaaaaaacaaaaaaaaaaaaaaaagaaaaaaaagaaaaagtcactattctcaaatgcaacacagatacatgttgggtagcataaaacaaaaaagggacatctcatacaaaacaagcagaactcaaggctgtagaagaaactcaccaaatagaataaaagccccatggaagagtgattttggcctatgatgtttattcctttatctcttatacttagcacaggatcaaaggcattcacataatacgtattcaatagataaaatggaagtggagcatatcttcaaattaaaataaaatgtcttctgtagggagagaatgatgatgaaggactttctggatttctagctgggttggaggacaaagccagttgggtagggcacttaggcactaggctcacatggggagcctcagcagatggaggcaagctgtgggcacatctagtgcgggtgtctttgcagtcgctttcagagcacacagggcttattgtggcattgattactggaggctctgggtgttcaatttggcttgaaaatgcctctcccaaaagtcagaatagcaattaagaaaagcgtggtgagagtactaacccatttaattaatgaggtcatttgttttgctgagaatcttactgaggtctatgaggagggcttgctgccgtggattacaaccccaaaggatggacgttttttctgtttagccctaaaagtccaaatctcatcctgcaacgccagtcactggtttgaactgacattcacttgtcctttcacactaatttctctgcggacctgtttgatttaagcggtcctccctggtgtgaggttctcaaatggattagataatttcagccagtgtttgtagtgtactggacccctgtccaaagaataacaatgaaattaaacagctacaatgtcctgctttttcccctctacagtaacagaggacaaaatcctggaacgtgtctccagcattcgccaagccagtgactttcacacactcttatctatttacatccagttcataaagatgacctcggtaatacagacccatgccagagctctgcaagcttcactaggacctacaaaagtaactgaaagtttaaaaaaaaaactctccaaaactcagaaagaaaatattaacaaaatctttttcaaggtaacattaagtcattgagtccactaaaattcagtgcatggttatattatcatatataaattatgtcccatgtgggcatattttgattgctatttttaatatgctgtgaggttgagtgtctccaaatatgaagataattcgtgaccttgaaagttctaaaatgaccttgagtctacttgcttcttgaaatctaggtaaggttattctttgaacttcctatggaagttcaaagccctccctgtgatttctgcaatttctatgtttctgcctgggcatggcttataatcacgtggagaggatgttaagacaaaaatggctgggctaggccctcatcaattctgattcagcaggtctgtggggaggcccagaatttgcatttctcacaagctcttagatgatgctgatgccactggctcttagaccacacttgtgtaacaagtgctgccctggagccgtggttctcaaggtgtcttggtccatttgtgttgctacgaaggaatatctgaggctaagtaattcataaaagaggcttatttggctcatggtgttgcagactgtacaaaaatcatggtgccagcatctgcatctgcggagggcctcaggctgcttccacttatggtgaaagggaaaggggagtcagcacatgcagagatcatatggtgagaaaggaagcaagacagagaggagggaggtgccaggttctttttagcaatcagttctacagagtgaaaactactcattttcaccaagagcgcaccaagccattcatgagaaatccatccctatgacccaaacacttcccattagtccccatctccaatattgggttcaaatttcaacatgaggtttggagggttcaatatccaagctatatataccttaaaacttagcgtcggaatcacctagagagcttaataaaacacagactgctggctgccatcccagagtttctgattcaagaggtctggggtggggcccccagattttcatttctaacaagttcccaggtgatgctgatgctgctggtcccagcatcaaactttgagtaatggttcttcagaggaccctcctttgatcctccttcagctgtgcccttccctacaggggagtcttgggaccaagggaccatcctcttccccactagaccctactctgggtacttgagatccttgtacaactagccttgagcccacttccagggcctgcatggggactattcataggaggtgggaggggagtggatggagttggatgtacaggctgggatgtccacatgccatgtgaggtccttgtagttcaggatggagccgaggttgagaagaatgggggatggaaccagagcccaaacattcctgtgcaggtagcatcatttcctccatttaggaccatcctgaccagagatgagaaacatgacaattaggaacataggttctcaagtcacgcatacttccattcaatccatgactctgaactctttcccccgtgacctcaggtaagttattaaacctctatgaacctagtctctgcatctgtaaaattggaataatgccaaatacctacctcattggtcttttggcaagagctactgcagtaaggtatataaggcatttagcatgagccttggaatgtagtaaatggttgaaactattgctcttgctgttgttattattagttgctgctttattaagtcctgtggtgggcggagcacctgttattcatcactgtcttcttgccttgtgccagagaaatccaggcaccttctgagcaggatttaggctcctggtgctctcctctggctgctctttgctccatcctgctcacagcccaaagtcctatattgaagaccatgaataaaggatgctagagtttagaagataacatgccttttttgtaaatggctaatctgaatgagcaacttcatagaaaatagtactttcttgctgctgtaattagaagtttcatgaatctatttgtggtcgagatagtaacatttatgaaaaatagtgcattcaattatttgacccttgctcccatttttcaaaggtttaatttatgttttctttgctttgtgactgctttagatacagtgatgaaatatgagtgtctttgtgagtgcttaggcagcccccatggatgttggagtgtgggcctgtgtgaatgagtgcctctcctcatgtatatatgagaattccaacctccagcagcagcaatgataacctaacttgtactttcaccaggctttcaacagggccatccagtcctactttctacaatgatgagagtatcctttctttgtgttgtcgaaaatgcagccactagccacatgtggctatgagcacttggaaggtgaccaaagggaccttaggtgaaaattgaattctgaattttgtttacttttcattaacttaaatttaaatagtcacttagcattagtagctaccatgtcgggcaatgcggattaagaaggtacttgctgacttgatctttgctacttctctgagagaggaatggagaaatgtatcatcttattgacaatgaaactttggagtggaaaggcggtgtgactgatttaagatcacagtgcagtgatcacacgtgggtatgaggcaggcggtcatccaccccatcaccacaggtaacctgcttcttcagagcctgagaaagtctaatacctgaactactaagaaaaagacaaacacttcaatagaaaaaaatggagaggataaaaaagtaacattcaaaaattcaaaagcattcttacatactaggagtaatcaattagaaaatataggctttcgatatgaagaaaagttgtgaaactgtccagaaggccacaaaggaagatgtgaataaacagagacaaattgtgttcctggtgggaagccccagtaggtcagttctacacaaagtaatttataaatacaaagcaattcccttaagaaccttagggatatttcatggagtttttcaaactgaagaaaaaaatgcacctggagtagaaaatgtaagagaatagcatagacatttaaaaatataaatcagaggcttggaggggcagggaaacacatgacaaagtaataataactaaaacaatatggggatggtgtgtaaatagcctgaaggacaaatgcaacagggcagagagtccagaacgaacccatgtatgtgtggaaactaggatgtgatagcagcaatgcctcaggccagtaggaaaagatggcagttctgtcctgcactgtgatttatagtgaaaaattcaaaacaaatgtcccacaatagaaaattaataaaatatcttttaagactatgcattcatgagatgacaaaataaaccattttaaaactatgatattactaaatgacaaaatgataaacattatttatggagatgtatatgatatactgttcagtgagcacaaaaacacactttacaaaatagtaaaaagggctgggcgtagtggctcatgcctgtaatcccagcacgttgggatgccaagcaggggcggatcacctgaggtcaggagttcgaggccagccctgccaacatggcgaaactccatctctactgaaataacaaaacaaaacaaaacaaaacaaaacaaaacaaaaaaccgtaatcccagctactccagaggctaaggcaggagaatcgcttgaacctggaggtggaggttgcagtaagccgagatcgtgccactgcactccagcctgggtgacagagtgagactccttctcaaaaaacaaaacagtaaaaagcatcatgtgatccatgtttgctaaatacattcacatatatggatacttctacttacaaaagtcacaaatgtagacgtctatcctgacccaacttttttttttttttttgagacggagtctcgctctgttgcccaggctggagtgcagtggcgcgaactcggctcactgcaagctccacctcctgggttcacgccattctcctgcctcagcctcctgagtagctgggactacaggtgccggccaccaggcctggctaatatttttttttgtattttttagtagagacggggtttcaccctgttagccaggatggtctggatctcctgaccttgtaatctgcctgcctcggcctcccaaagtgctgggattacaggcgtaagccactgcgcccggcctatcctgatccaacgtttaaactttatttttatatttttgtttttaaaactatggaatgcttcacaagttttttgttatccgtgcactgaggccatgctaatcttctctgtatcattccaatttcagtatatgtgctgccaaggtgagtacatgacttaattttttagaccaatcttaactgaggtactaaacaatcagcagcttaagcctctacttggttgggttaagcgttaagccataactcccaatcttgacttcagtggtctatccctgatggctgggctcccacgtggcttcctgagttgcctttgaagttgaccacattcccaaccacgtgggtttaggaaacagccctaggggtatatttttctctagatcataactcttcctcgtgatctttcttttttccttgtctgctacaccaggtccttccctgtttggtctagcaagcagagatcaggggagtatcacatctaaacagattccactaacattccaagggaaatggagtggctctttctgaaaaataagaacatgtaaaactctagaaagaccatgggaagaaaaaatgttttctctaaaacccttgagtccacatcctccactcttaagtggggagcccagaacaatctttccaatctcttattcaccttttttttctttttgagacggagtttcgctcttgttgcccaggctggagtgcaatggcaccatctcagcttgcagcaacctccacctcctgagttcaagtgattctcctgcctcagcctcttgagtagctgggattacaggtgtccactaccacgcccagctaattttttgtacttttagtagagacggggtttcactatattggccaggctggtctcgaactcctgatatcaggtaatctaccggccttggccttccagagtgctgggattacaggcatgagccaccgtgcctggcctcttattcactcttatatcctcccaataatttttggacttaatgaggaaagtgtgttgtttgaacactgcgcttggcgcattcagcttcatattcacagccagtgcccatctgggccagttctcccatcactagctcattttagtgtatccagatcatggcagtttaccaggacacatcacttcttctcccactcaccctcctacccattcctgcctctgtttcagagggacacatggtggtagagccctgatactgctggatatatctagaatgaattcctaaaacaaattgcttctgaagagtccccagactggtggctgagcgagtgagaattaagtgtcagtgaaggaactaaattaccacttattgcttcatccatataattaagttaataattaaaacatgactagcaggggcctcatccaccaggaatcataatatgcttctttcttagaccattgtcacaaaatatgaaaaccacatctgtaattgttctcagaactgcttagcaacctcagctttaattgtcagccagcttatcagaacatgcagttaattatcgtgtctcatacctagaatgttcggcatgtgaaagagttctggagatggatcttccctgcagtgaaattgagtcagatggatcacctgcaggggagttcaccctgggagaatatttcagaatttgcctgcttcttcctggaaccagcctctgttagaatgcatgattccgtgatgaaaacttacagattttccatggaggagaagacctcttcctgatcatatgtccattgttatgggactgtctattagtggtacagttgctgagccagcccaggtttagtattctcattaataacaggtatttggatgctcttaacagttctaggggaaatttatgagtgatgaggtaaaataaaatgctggatctgagaacaaagagatgagttccatggccagtttttatgccactagctgtgggcctttcttcaaatcttatctcactaaacctcagtttcttttcttttttaaattatactttaagttctagggtacatgttcacaatgtgcaggtttgttacatatgtatacatgtgccatgttggtgtgctgcacccgttaactcgtcatttacattaggtatatctcctaatgctatccctcccctctccccccaccccacaacagaccccggtgtgtgatgttccccttcctgtgtccatgtgttctcattgttcaattcccacctatgagtgagaacatgcggtgtttgtttttttgcccttgcgatagtttgctgagaatgatggtttccagcttcatccatgttcctacaaaggacaagaactcatccttttttatggctgcatagtattccatggtgtatacgtgccacattttcttaattcagtctatcattgatggacatttgggttggttccaagtatttgctattgtgaatagcgccacaataaacatacatgtgcatgtgtctttatagcagcatgatttgtaatcctttgggtatatacccaggaacaggatggctgggtcaaatgtaaactgcagtttcttaatctgttaaatagggagaagcgtaatagcctgagctggtatgccttgggctgctggcacatcagcaagtgcaaagaggtttggccattggaggtttttctttgactgtcctaaattgtttcttaggtgtgaattttacaaacattacttatattagcggtaacggtggagccagagagtattgcaccttctccaagctgcacggcgagaaccactaatagtgtggtggaacttacggccctttccaaggccacagctctttcagcctgcagctatcagcccattcatcttcctgtgcttgtggactggtatggtgattcacagggtgtcaggatttcttctgacagctttatggaatgtatcaatgaggataacctcaaaaaatttgtatgaggaatctttaccaacccagtgagaattcaggcctcttagaggcccacagtagcatccagctcactcctctgcaatgaaccgaaggcttcgagcaaactttagctggttaacaccaggatggacaggcttgctgtaagttgcacccgtaggaactgggtgttttccaccaccatggcgcacgtgaatcctatatataatgtaacctgacttggccttctatcccagtccatgcgctttgtatctgacttgagggatgggaaagaacccagaagagagagtcacactaagcgaatgtttcagaatgaatggaaatgttgtctttgacaaacactcctaagaggccaggggaaataactgaaagggttttactgaaatgggtccagttaaacaacccattatggtactatatgtttttgctaacatgtctgtccactagcctgaaaactcctttagtcttctcgtgtcctgtaactttgcttggccttgtaactctcagaagaaagtgcattcttctcagtccacattgtgggctactcaaacaattaaaagttggaattcccaggaccggtccttagccccttttcttctggtgctcttgtaaccttccttggccttataacccttagaagaaactgcattacatcagactgcttcttcctccgtggctcctggagatctttgtgtgtacccatcttggcttactggatggctgccgccagatggaaaggccgttggaattactgaaatgcagaaatgctctgtgccaactggcaaacagccaccatcaaagcccctcttcctgcaccccttgcccgctgcctcctgatcgccttggctgcattggctgcaggtttcctcacccggactcccatcagcatcagctaaagtttcacgtctggtccagatgccttgtgacacggcatccttgttgtcgttatcaaggtcatttttgagtcctcagtaccttggccgtgcccatggctaaatgacatcgatgcccttggggagaagcatcacccacctgatgagttagtggttgtttacactctctacaaacaaaaagaaaggtgatttttagatttttccatctgactccttgtttttggccagctgggtggggtcaaggtcagattttggctgtgagtgtctattaacacgtgcacttttgcttcacaaatggaggaaaaacctgttaatggtagagcctttggataattcaggcaaggattagactgaagatgaccttgactttggagataatgaaatttaattatgcaaatacaattggaacactgaaagcacataagtaaaattggttttgagcacccaactcactctttatgtggtgaccactggcgggattgtgatttaagctaggtaggctgtgggctattcacataaagagtatcagtgagactgtagttcttttcaaagatcttgttgatttctctgttcatgtattgcaaatgactgaagacttgttccatgttttctctctcctccagaagtgatttttaagatcttttaatgcctagggcatgttcattcattcaataaacagtttttgaggctttactctgtgccagacatttgtactaattgctgggaacaaaggcagaaaaccatatttactaaaggagttttcaggctagtaactagacatgttaacaaaaaatacataataccataaatgcgttgttttactggacatctttcagtcatttccctggcctcttaggaatgtttgtcaaagacaacatttccattctttcagaaacatttgcttagagtgactctctcttctggtttcccttccatttctcaggttgtttcttctcaattgtgggctacttgtattagtcagttctcacactgctgataaagacatacccaagactggattattaatgaggaaaaagaggtttaaaggattcacagttctacatgctcagggaggcctcacaatcatgctggaaggcaaaaggcaagtcttacatggtggcagacaagagagaatgagaaccaagtgaaaggggtttccccttataaaaccatcagctctcgtgagacttattcactaccatgaataagtatgaataagtatgggggaaaccgcccccatgattcaattatctcccactgggtccctcctacaacatgtgggaattatgagagctacaattcaagatgagatttgggtagggacacagacaaaccatatcactatccaaacaattaaaagtcggaattccccaggacctgtcctaagcctttctcttctcatgctctgtgctcttcctagaacatttctttcacttccattgctttaattaccattgctgtgccagtctcttaagagcaaccctctcttccagagcaatgcgtccaacagcccattggatgtctctccttagacatctcacaggctgcctgaaactcaacatgtctcagatagaattcttgttctctgaaccgcacccacaccctctttctagtccaatgtcctagatgttttgttaatgacattactgtccacccagttggtcaagccagaaacccaacaattacctggcattcctctccctatacctcatatccaacaaatcatcaagttttgttagttctgcctccctccatatctctggagcgtttctccagtgccacagccaccacgcctgtctaagacctcaccgtctcgtacctgggtggggtaatgttctggtgtttctagctccactgtttctcccctgcaggccttcttccacatggcagatgtggtgatctgcttcaattgtagatctgattacgtctacagcagttgtcattggaggtctgccgaacctataagcctctcctttacagagacgtgtgctgattcctgaagccatgtttgcgtcatgagagctggagttcccttgccttgctcatagctcattgaattagggatgaatacgctgacccaagctggcttaattgaattctttctccatgaagtttgaattggggtcaataaccactgttgtgtgtgtctctctgtatggctagaccctttggtttttttttttctttcttcctttcttttcatttcatttccttccttcctctttctttttccccttctcttttctttctttttcatccagttttattgaaatataattgatgaatattgtgtatatttaaggtgtaaaacaatgctttgatatacatgtactatacattgagaaataattactatcaaactaattagcatattcatcagctcacacagttactgtgtgtatgtggtgagaacattgacaacgtactgcctttacaaatttcaagtatacaagaaagtattactgactgtagtcaccaggctgtacattagatctctggaacttcatcctgtgtaactgacagtttgtaccctttgaccaatatctctggaacaattatccctacaccccagcttctggccactgccattttactccctgcttctatgagtttgattgttttggactccacatataagtgagatcattcagtatttgtctttctgtacatggcttattccatttagcataatgtctgatatagtttggctgtgtccccatccaaatctcaacttgaattgtatctcccagaattctcacatgttgtgggaaggactcggggggaggtcattgaatcgtgggggtcagtctttcctgtgctatcctcgtgatagtgaataaatctcatgagatctgatgggtttaccaggggtttccgattttgcttcttcctcgtttttctcttaccactgccatgttaagaagtgcctttcacctcctgctatgattctgaggcctgcccagcaatgtggaactataagtccaattaaacctctttttgttcccagtttcgagtatgtttttatcagcagcgtgaaaacaaactaatacaatgtcctacagatagaataataaattataatatgagggttgtagggtgactgtcattcaccctgtttttggagaagcaaggaaaataactgcaaacagaggaagagaaaatagtgaagcagaaacactgagtggcaacagcacagatggagagagaccaactctaggctttcccaagagtttccagattatgactccaggctcttttctttcttaagtttcatcaaatttctatgagtcgttataataaatttccacatttcacttaagctactttgagctgatttctattccttgcagccaaataattttcactcacacactggcattattatgttaaaaaaaagtcaaaattcccttgaccttaggacacagccccaaattttgaagctggacccaaagccctgatcaacttggcttctcactgctttgtgctctgcactatggtcaccctggaagacttccagttcctggacatgctgccctctcttttatccctgcccctgtcgtcctcctgccagagtatactttgattcccttctccacctacttgtgccatcctcttccttcacattcaacataaatgccagttcctaggaagccagcatcttggctttccaagcaaggctgctgccctcaaggaggactcccttggcattcgatatttcctccctacattcacttccccatcataccttagcttcaagaaggtagcagctgtggtctggttcattttcagctgtatgctcagcccttggtgttcagcctgccacagagatagccctcagtatccatctgtgcatgaattggttgctgggagaaccctggagaaggagcagccatgtttgcaaggagagctagggaagattttgcagaggaggtggtgtctgagcagagccttaaaggacagaaaagaagatcccatctaagacactctcaagaattcagggacacaggtggggcactttgggagggtggggagtctgggctttcaagtcaggtgctcctactaactgtgggacttagggcaaagtcctggctagaaggggtaatgtgaagatcagaaagggcaattacagagtaccagccactacttttaataagagaaaacaatcattattttctgtagatctgagcatcaccaaacgccttacattgttgtaaggattgcattttctgaacactaatgaaaaccctaaataaagttgttattaataatactgataatcagaacttgaagcccgcagtgaagtgctccttctctcaacaactggacaatcattctcttcctttgggagttaaagtgaaacatgcaaagtcaccagaaatatgtagaatagttctcagaccagcaccatttaaatgtaacttggttgaatatatttacatattaaaaaaaagtatgtcaatcagagaattaagggacaggaaaagcagtcacagaggcaaacaggcttgacttggcctgtgcagaaaggagggaggagggcagttcagccagcagaagtgatggctttctgtttctgaggccagccctaggatgcagagatgttctgatgatgccagtaatttcctctctgctctctgacaccatcttaaagggcctgcctaagccacagcacccaatgagacagatttttatagcaaaagccccagctcctggctcctccatcctgaccataactgatagagttaagagtgaacatcagactagagctgagcttatcagtttcaatgtgttcagacctttccatcagggatgggaagactgacacagttggttgtggggggaacaaggctggaatgttgggacatcatggaacagaagccatcatcttgggatggccttgttgaagccttgtacacacagagatgtaagcaaagtcatgtctgcaagaagagaacaataaataagatatttatagaaaagaagagataagagtaggagaggagagagagtgagagagaaaagaaggaagagagcgagaatgccatctactaaatttctggttccacgaagcttcgctctgcttctaaatagctttcatttttcacgtgagccttgatgagtagagctatgttccacacaaccaaaccatttctaactaagatggggttttaggtgacagcctcaattatttcaagttttcctggcaagatcttcccagcatgagtgaaatggatggatcatgctgcgtcagccaggcatggtcaggctgggactcaaaccgtgtcttcttcttagattcgtggcctaccactatgaaagctgggaccttgttgtataataatgtggcttccacacatgggtggcataaaacaatgtcaatttattatcttgccattcttcagtttggaagttcaacattggtctcactgggatgaaatgaagtcatcatcagggccaattcctttggtggctctcaggaagaatccatttccttgtgcatttacagcttctggaggctgcccacattccttgccttgtggccccttcttccaccttcaaagtgaattatgtggcatctttctgactctacttccagtgtcacagctttctccagctcactctttttactcccctgccccatgtgaatacactgagcccacttggataaatcaggatgattttctcatctcaaggttattgtttggtcatgttcccacccacatctcatcttgaattcccatgtgtggtggaggggacctggtgggaggtaattgaatcatggggtcagatcttttccatgtgttctcacgatagtgaataagtctcatgagatctgatggttttacaagggggattttccctgaacaagctctctctttgcctgctgccatccatgtaagaggtgacttgctcctccttgccttctgccatgattgtgatgcttccccagccatgtgcaactgtgagtccattaaatctctttttcttcccattctcagatgtgtctttatcagcagcatgaaaatggactaatacagcaacctcaattcccctttttcatataacctaacaattcacagggcccagggatgagggcatggacattttggtgggtagggagcattattctacctactccatatggggagaaaacaacaaataccaatgtagagcattctttaaaaatactcattttggcttaggaaactttgatgctcaactagtgatcttctgaacccatgctttaatgaaaaatagcatggactttccactcctttaggcctgagttcgatcctaccaagtctatgacttgagtgtgtgtgtttaacttctctgtacttcagcttcctcctccataaaatgcagataatgatgcggaactagatgaaatgtttggggaactagatgaaatcaaatatgcttttaaaaaaacattataaatgcctttctttttttttttttttgctttccttactttccttttcctttccttccagcctggaaccattaactgaatataccaagaatgctcttgagtgaggacccatgctgtcttggtcatgctatgtctcagctgcagaagtgacctggtgctagaaatctgaaactagcattccaccgggatgacaatccataatctcctcatgctccttctgccccatatttcaggtcttgttatctccaggagcgagagccattcaaggtcttctttttgtctttcttttctcacagcttacaatgacaagggccaggaagccaaggagaggatatttgggggttgctaagtaggagccgccaggacagtgatctcgagggcctatctgaatgatgggaggtattgaagaattcccaatagactgcatccagatcatggctacagcaagcttttccccatccctttgagcaacttatattcctttttttgtcttttttttttaaagttttattttaagttctgggatacatgtgaagaatgtgcaggtttgttacataggcatacatacgccatggtggtttgctgcacctatcaacccgtcatctaggctttaagccctgcatggattaggtatttgtcctaatgctccctctcctcttgtcccccaccccctgacaggccctggtgtgtgatgttcccctctctgtgtccatgtgttctcattgttcaactcccacttcttagtgagaacatgtggtgtttggttttctgttctgtgttactttgctgagaatgatggtttccagcttcatccatgtccctacgaaggacatgaactcattctttttcatggctgcatagtattccacggtgtatatgtgacacattttctttatccagtctatcactgatgggcatttgggttggttccaagtctttgttattgtaaatgagcaacttacatttctttaaagtgttggtgagctctgcacatctgtaaccacagccatgggcttctgatgagaacttcttattttactttatgtttgaaggagcttggctgcctttgacctcaccaccctaggaattggaatggaatgagtgaaggagttcctatgttggtttgtggcaggaagatagtccagttggatttaagtggtatcattatggaaatgcaaccagtgcaggtatcaaagcctttgcaaaacattctagaaggttactcatgttttagctgaaaaagcagtctgctgattataaaatatggctcctcagctttcctttcagttttagacagttaccatacctcattggcagctcacaatgcatcttcacagatatgagcacttttcttggtgcacgggttcctagcagagtctcagagtcagacaggccagtgttgaaattccagttctcctgaaactagcagtcacttaatctttctgagtttcagttctcctaactgtaaaatggtggcactaataactatttccttgaattgctgtgcttattaaatgcccctagcacggcaccaagccctcattaagcacttggaaacttatatccatttcttcttttttgggttctctgcatataatgtttatatacatcttaattaaaactgcttctttccttaaaatatctaatattcacgtatagaagggtattcacagaaaaggatgcagctacctttccttctctgggcacagtagacatttgccttcccagatttggaaatgaaggaagcaagattgccttttggggaattaggcacagtgcatcacagtacagatatgtgaactcagctgaaggagaaggcacagctctcaggtagacaagcccccacagccaccagattgaatgtatttccatcaagaaaggatgtgtccatcagaggaaggacttgtcagctctggaataagaaagaaatgtgagtaccagaggcaaatatcagcaggatccatcctagggtattccccttaaccagtgactggaagagttctggttttgtcagggcagaggtggagcccacatattttaagcgactctggtctcactggcaagaccgtcctccttgcggaatgaaaacactgaggtatctcagctggatgcctgaagcactggattattgaacttccccctttctgacttcaggctcaccagaaactttcagtctatgatttggcttctccttggagtctgtctgtggggagactttgggctcattctatggaatctgagtttttaggtctccgtgccaggaatttctcacagtaaatgaaggcattggcattctggttttatctgccagtgttctgtgcttggttaaagtgtctctattgagagatggatcccttttcagattctgtagcatccaagtagcagatctaggatgatggaaaattccccaaagtaagccatattagtttatgagacatcttggaagatagtctgctggcctttcctcttggtgacaaccatctggcatttcagaagaagaacatttccaactttgacactaaccatacagcccctccccactccatctcactcaataacagcccatggtgttggtgtcacatgctagaaagattctggaatttggaaccaaacagacctgggcttgattctgtctctgctgccttctgtctatataatactgggcatgtaatgtaatgtttctgaacatcggtttctccatctgtaaaatgagattcctcatagggatgttgcaaggatgaaagtgacgcagctcaacgaaatgtagctatgattatcacgtacattggcaatgactcattgatgtagaatgatggtcaagtgtggatctttcattctaatacgtacagtgaatctgttatatgcaatggcgcctgactagttttcagtgatgtgccatcgtcatggcctttcctggggtggacttctccttaaggaaggctaatggatttctgcacctaagagctcaaggaccttgctgagtttttattttccccacaaactaacaaagttgcaatacctcagtctggcttcactgttccaggtattggtaaaattaggttgtctctcctctctgggcaaaactgtgctttgattcttttgattataaggggagagcattttagcacatccagagatgaaaacaatcacagtttccctctcagcaaagttctggctgcattgccgagcaatagccaggtggcctgctttgcttccatccttctgtgcattctttttacaaggtctgaacaggctggagcttccccaaatgctttgtgatgggaatggtcatggagggccttcacctatggcctcaagttgagcccctgaaagtataaagaggcaacaattttggcaaagcaagtttgttttaaaggtataagcatatatatgtcagtgttttggtcttccttaaagtagaaattactgcttcatggtaccattcgatcagaactttggtaactggttcgttaaatgagaacattcttttttgtatctgcccatttctacctgatctctgtccctggaaaacattttgggtgaatgcagtcgcttttgtggtcactcttagacaataacgacaaatttgatataataatgttacttggctacttctaggtaagagaaaatctagtccaatctaatatacaaactccagactctccttccaccacttggccgatttcaggtttggaagtcatagtgggggaaatagttgtgattgcttctccacccatttccatcttacctaccctaacaccccagcagacattttaggaccctcctgtgttggggtcgtaggtggggaggagagaggagaggaaggacagaagaggcttcctgcacctgcctgtaacctgtatgtggcagtaagcatatgtctctctctctctgtgtggcactttgtgaattcctccatgagccctctgactgcagcccctaaagctgaggaagccaccacacgttggctgcctttgacttttttctcttgacagctgtgcacccaatggcacgcccacagctcctgctgagattgcctcactgctggcaggaagcccacatgggcaagcttcttttcttcctcttcattaaaaaaaaaaaaaacacttaagtggtaacctgattataaaagcaacacacgtgacaacagaatatttctaaaaataagagagcagaagataattagtcaaattcccgccacctacgtcccaaatgcccatcagcagatgaatgaagaagcaaatcgttgtacattcccacactggagtaccactcagcgataaaaaggagtgaactattgatacgacaacatggttgcatctaaaaataatcacgctgagtgaaagaaggcggacaaaaaaaagcatgcatactgtctgattccatttctataaaatgctcaaaaatacgcactgatttacagtgacagagagcagagcggtgattgctttttaatgaggcaaagggaagggtgggagggatggatgctaaaggagtagaaggacgtttctgggtgtgatggatgagttccttatcttgattatggagacagttttgtgcatgtatcaaattgcatcctttaagtacgtgcagttctttgtaaatctattatgtctcaataaaactatttaaacatttttactgttgggcatattcagacagggtctttttctttctttatttttattttttattttactttaagttccaggacatatgtgcaggacatgcaggcttgttacataggtatacgtgtgccacggtggtttgctgcctctattgacccatcctctacgttccctccccttgcccctcaccccccaacaggccctggtgtgtgttgttcccctccctgtgtccatgtgttctcattgttcaacccccacttatgagtgagaacatgtggtgtttggttttctgttcctgtgttagtttgctgagaatgatggcttccagcctcatccatgtccctgcaaaggacatggtctcattcctttttatggccgcatagtattccatcgtgtatatgtcagacagggtctttttctagaagggccatggctggttctttcctggaccacccatcacaggctccttcccccacgctcagtgtaagtgcagcttgcatctttggcagcctctgtattcagctgttgcctattacctgtagactctttaggaatgagcctggctgccacccaggcttcagggagcctcgatagttctccttaagtcctgtcctttctctgacctgaggtgttggacccgaagcttgctctcacacatgtgtggagagcaacccatataaaacaccaatatctctcttcaaagatctaatcctttgcatctctttaacctcctgtgagtctcggctttttcctccatagcctggagacaggtgcacatctattgaaagcagcagtagcttttggcaatgcccttcgccaagcctacacatgtggttcagcattacagtgggtgtctacttggcactcattgtttttagctttggggtcacagctgaaactctgagatgacaaaaagtctcattttaatgacctgtttcacttccctttggttcactgggatacaaagagatgaatttttcccaatatatttttagaggcatatttatcataagagcaggccagcagcctctctgagtgctgaggccctaatagggacttgcagttattgtatacctacacccccacaaggcccccaaagatgcagagtggaccttttggtccctctcctccctttgtctaaggacatcagatagtgatcataaatattcatcccatctatttcctgatgctgggaagggaaaatattgcaaacaccacgagcacttgttgaagacacacatacgccaggcactgtacccagaactgactctacagtggtgatggacaggtcctgcccacgtggatcccccagtctagcagactggacaacaggatggtggcctggagaagagggtgaacataaactggtggacaaagggccacatggttcgcctccagagatcttctttagaaaggagtcaaagggctgggcgcggcggctcatgcctgtaatcccagcactttgggaggccgaggtgggtagatcatgaggtcaagagttcgagaccagcctgaccaacatggtgaaaccccgtctctgctaaaaatacaaaaattagccgggtgtggtggttcacacctgtaatctcaggtattcaggagactgaggcaggagaatcacttgaacctgggaggttgcagtgagctgagattgcgccactgcactccagcctgggcaacagagtgagactctgtctcaaaaaaaaaaaaaaaaaaaagaaaagaaaagaaaagaaaagagtcaagggtgagcagtgcaaggctgaacagctttccatattagccaaatacaccacctccgtcaggatcctccctcatagaagtcaccagcacagaaatgagtcagaacattgtcacgtgagcaatgggagcagaatctcccctcctcgtgtccttgctgctgggccacaggccagtggtaggcctctaaagggtttagagtcacacaggatgatgaaggggacaaatcaagaagaaaagaaaaaagggagcttgccaggcaccttcttctgcacctccaattccaaatgcactcagtggatgcgtgggaagtgctgaatcacatatgaaagcaaagctttaaacaggatagaccaagctttaacaacaacaacacaaaagcttgaatgtctacgaagttggatctgcatctcatggagagcccaggaggtttttgcagagtacagctggtaataaaaatatggaggatctaggccaggtgcagtggctcacgcctgtaatcccagcactttgggaagccaaggcagtctgattgcttgagctcaggagttagagactagacggagcaacatggggaaaacctgtctctacaaaatacaaaaaatttagcagggcgtggtggtgagcacctgtagacccagctacttgggaggctacttgcttgaggccaagaagttgaggctgcagtgagccgtgatcgtgccatgcatttcagcctgggtgacagaagacagaaaaagaccatgtcttaaaaaaaaaagaggaagatttaccatgcctcagagactaagtgccttacattgtaatataaagtctttgaatcctcacaatgaccccaggaggtaggtgctgttattaacatcgtcctttcctccatgaggctaataagacacagagagattaagtgtcttgtccaaggtcatagagctagaaccttgactccagaaacagcatctgcaacccccaaccccccaccctcgcggccttttgcctattctgcaatctcatgaaatttcctttccttctttgaggccaggagctctccaaggtgctggagagaggcccagaagcagcgtagagaggcagccccgccagaccctgcaagaccatagtaaggaccaggattttattttgagaattaagggaaaccacaggcgtctaaatgaatcactgctgcttccgcgctgtcatagccagcactctggctgtgtctctatttagcacttgagagctggctgtttacgtgcctacttctccttctggactggaaatgtcttagagcagggactgcatcttagccatttttatatcttcttcacgctgtcccagttacacagcacagtgctggcatatattaaacatttagtacctgtttattgaatgaaattaaagtagaaatggattcttaattatctttgaaaaatctcattttccggcagcccaattaatttcaaagagactcaggaatttctacagtatcatggcaataacaatggtaatgttaattccggttactaagctctcagtgttacatgctgggatttgggcaaaacactttatatcacccttagtatattgagagagaggtactctaggtcctcccagtcactggtagtcctttcccaagcagaagactcacctgggcgagcttataaatcccagaggttaaggagaatacgatttcacaggagtggccactaggtggtggtgtgacaccatcatcacctcgccgtgggctagtgggcaacttggaccaattgcgcggggccggtggagtggctgggggcctcttgggaatcaagatggccaagatgggggtctgtgcaccaaactctgtagttgaagttgagggctttccagtttatgctgcccatgagcagatgaatggagaggactcttactaagccagggtgcattttcttcttgttgaaatctgaaaattattcacttcatttcaactcagttgaacaagacattattgagtctcagctctcactaacaccccctctgtcttcacaccctctattttagactggattggggtgtggggacaggaaggccaccagtcccagttctcacatttatgaagaacatgattaggcatttaatgttgcattcaaataaggccatgcatacgatcattatatccctcccgatgttaaaacagtttattcgttcttacgaataatggtatatttaagttgtaccattatttttgtgctctttttttagcataccttcgttttaaaaatatgtcagcatctttagatattggaagtatttaggactcctttctcaatttttgaagagctacctgtttgaagagcaactaaaatgcttgcagtcccatcaaaataactaatcgaccacgctttctctgattttattgtttttgcgcttgctaatttccacttctggaacagtttcttctctgtcttaagttgatctattcctgcctattcttcagattttagattggacatcacctcctgtgcaaaacaagagcttgttaggtgcttgcttttaccccattgttattctttctactatgctgtaattcacgaatccttctctgtgtcccctaaaagatcaggggttctcaacttggggtatttggacctttaggctatccatgatatgcccttaaaattttgtattatttacttactgccacaataatacagaataagagcaaccacaaaacctcagtggcccatagtaagtgaatatttgttatgtgtctagagtcagctgaaattcagccaggcaggggtcctgccactcttggatgggcttgtttacacctctgggattacctgactgctggctgatggagattggcccttgctgcggcaactgagccgtgttccacatgcttcccatctcccttctggactagaaggctaacccaggaggtccttctcataatggttgtggaaatgcaaaagatcaggccccaaaatgcaagtctgtttcatcagcttctgcattggccattcccactaacatccctttgaccaaagcaagttacatggatgagctcaaattcaagtggtggggaaggcccccctactcacagagggaaggttggccatgctgcgtggccaagggcatcattcagaaaagagagaagaattagggccattgctgctatctaccatggattgtatgccaaaatactgtatattttctggaaagatgatctaaggcttttaccaatttcttactgggacccatatctgcaaaagttcaagaacctctgatatagacccaactttgagtttagggactatattttctttatttgtatatcttcaaaacctaaaatatagggccttgatcataacaggcgctcaataaatgtatgtagaatgaatgagtgccttttgtatgcaggccatgtatagtattaggttctggggatacagaatttagccaaccaaggactctattctcaaggagcttctactatgtgtgctctctgagagagctgtttttcaggggttggagtcaggaggcaggtggacatccttccgcctcagccagtatgtgtttgcatcattatgatgccttgagggtgaaattcaagaaagaacaagttcaggggaaacataataaacaaagatgctcaacttctggggtcccaaatgtgaattatcctgcagaaaccatatgctgtgcaagtaaacatatatgtgggcataaaaaaatagaagtggagacctcatatttgttggtgtcacaaagtgaataatgcattttcttagcagctagttccagaatcccggtccaacaaggagattgcctctgtccaagaaaatatcttgataagctgctcagggcagaaggtgagagaccctgaaggcatgggtgtccagtgaaatgaattgtttattttttcctcacaatgcaggaaagagacaaaggagatagaagaagtggaataaggggaaagataagaactggaaagctgaaccatagcccagacccaagcaggagaaagagcaagaaatgcctatgagaaagccggaaagaaacccctggaatttggaagaaaatgtctaaaaggttgttttcaggagatggctggaaggtgttctctgggaccctccctcatgactcctaagtaaccacacttgcaaatgcatcttgcattttgtttcctccagctttgttttggttttgctatcatggaactgagaaaaagactgagttactcatcaggattggtgtggtcccaaagagatatcacttggtaaatgtagtaacagatttagtagcaggaccctggagatggaggtttctaggcttgtgcttctgaagtcttagggacttggggaagggtctggaagctcagagactgtggaaccatgggatatcagggcatctgtgcctggcacttgctctacgacactttctacttgtaatgttgggctggtttcttaaatgttctgcttctgttttctcacctctagactgaggataatagtatcttcttcctggggtcttggggagctatctaatgagaaatggagacatcatacaagacatagcacctggcacacacacttatacatgttagctctcattattttagatgtcactgggttgttattattatttcttttgttgttcccagtagctgacatttgggtagcattggcctggtggactggaagcaacacaggactgagggtcagaaaaccagtctggtctttgctcctcccctaaacagccatgcgaccttgaggaagtcactttgcccttccaggcttcaggcttcctcttcctcctctaactgaagaaattcgacaagactttctctgagggttgttttttcccctcaacctgtaggaggcaccatggccccgcagctcccagcctcacaaagcctgttttgacattggaggaagcagccctgttgcagtccacggtccactccgaaatccattttccccactcagcataacactgaaatgagactgacttggtgtgtttgtttacaccccttgggaagttatttcccctttcacttaattacctgatatccagacattgctgtgcaaaattcgcctcaaatacattttgtaaagtcatctagacttgctcctctggtgctttgattaaaatgtgcaatcttccccaggcttcagcacctcattaaataattgcacctccagtgagaaagtaaacagcacactccgggggcacagagaacaagataaacgtggtgcacatccagcagctattttatactccatcccccgggcaaacacataacctctggcttaagggctggatggatactggctttaagttgctttctttttgcaatctttttgggaaggagtatgatctagaagcagagcagaatctcctctccccgccctttcccagctcagtgtctgcttaacttgggctcagccccggcggaaggaccaagggttggttgttcactgggaacctggctcatcccctagcagcaactttgcatgcaaagtaccaggcgtgggggctggatacagagcacatttcctagagggtgttgcagtgctgttaagggattggcaactttgaatcaagtcccacctttctcattaattcttgatgttgaccttgagcatttcactttaccttttctgaccttcattttccccctgcctcttctataaaatgaatctggggtacgactatagagggagtggctgagttaggatggaggaaaaaaatcagtggaaaagatgaggtcaaggaactgactcacaaagcctatgatgacaggtgatgataatgaccaacagcacaaggagccacctttgggctccaggataggaagcttgattcaagatgatgtcctaaccaccatggtcccaaaaaaggctgaaggatgctggttggtgagggtgttggtggaaatttcttttccgtggcattacaactccaaggtatgggaattgaggatctaaccaccaggctggcatagattcttcttgaatttgtcttcttgttccacagggaatggcaaggaacctgaggaaccagcgtgaggaaaacctggatgatctgacgtcttcctcactttatccctacctgtccacgcctccatccatccacccatccatcactgatcaagctctcactatgtctatagtgtagaaggtgccaccaaatgcaatggaacctcttgtctcatgtgtctacttgcatctttaagttgatacacggaaggcacagtccaagcacaggatactggaagctatggaggtacagtggcctctgagcaaactgaaaactctctatcactaaagggttgggcatacagggtatctcctctgctctgccacctaccttgaggatgctttacatgtggctaaaagtggaggcagagatatttggataaataaatgctagagaattggaaattcctaggacaagtcaatttggatatgtctatgtcatccttttttttctaagagacacgtaactctgatccttaaggagttagagagttcccatagcttagggtctggaagccatattcctttttatgtaacatccttgaatatgctactcgtataccctaaatttactctgtaatttttttttttttatttgagagggagtctcactctgctgcctatcctgaagtgcagtggtgtgatcttcactcactgcaacctcctccacccaagttcaagcgattttcccacctcaggctcctgagtacctgggattacaggcacatgccaccaaacccggctaatttttgtgtttctagtagaagcgggatttcaccatgttggccaggctggtctcgaactcctgacctcaggtaacccacccaccttagcctcccaaaatgttgggatttcaggcatgagccaccatgcctggcctataattattcttcacaacatatttcagcaataggattaattatatgtgtcattaattattcaatgtttgtctgtcttactaaagtgtgagctccaaaaggacaggagcttaccacaaatagctacaaattacctatacacatcctaggtactgttttaagcccttcagatacaacctgctcacccagaactcccattctggttccaggatggggacaaagggaattgctacctaacacagttgtcagaaaaagtctctcaaatcaggttgcatgaaaacggagactgaaagcagtgaaggaccatatcatgaagctctctgggaggaggggcatttaaagaagagaaaatggaaagtgcaaaggttttgagggctggaacatgtttggtatattcaaggaacagcaagaagaccaatgcaactgttgcagaataatcccatgtgagagtggtggaagatgaaatcagagaggtagcaggtggccctagcttttactctgagtgcgacgggaagctgtttttgagcaaggggagaaagacagagagagagagagagagagagacaaagagagagagagagagagaattgggaggtatgtgactgggaggtatgtgactcaggagttgggttttgttcgtttaaagtttgagatgtgtgttaagaatccagctgagatgtaaagttgggttgaggcatgtggaattcaggagagaggtctagcaggagagataaacctgggagccatcagtgtaaattgcatttaacaccatgagcctgaaagaggtcttagagaggtctctagtgagaagggtagaccgggaaaagaaagccgagggctgggtctggggccattgatgttcagacgtctgagatctgagcagggaccaggagaaacaaccaagaaggagtggccagtgatgtagaaggagactctagagaaaagagcatcctggaggcaaatcataaaagactttcaggaagaaggtagggacaaaaattgtcaaatgtttctgagagactgagtaagatgaagaccgagaattgatgattgggctttgtaacatggaggtattggaaacctagataagggctgttttggtgaggtgatgggcaaaaaagcccaaaagcattgagttcaagatggaaaaagaggtcagaaattggagaccattctgcaaaggagagcagagaaatgagtgggaactagaagtaggtaaagggtgagcaaagggtttgtgttttgcattggatggaaaaggtcaagaagagagagaaaatttgatggtgcaggagacagcgtggctgaccgatcaatgaccttgttattgaaaaagagaatgaggacctagggttcaagcagaagggctggcattagagctttcagttcatctgtgatgttgagtgggaatgcagagcttctaggacaaatgccctgagggtggtagatgtcttggtggaagcctgcaacattttcttctgattgcttctattttcttagtccagagtgaggaggagaaagaagttacaaaataatagtttagtctcttaattggattttctccaatcacactaggcagaaaagcatataaatggatgacttgcgaaatggagtaggattggaaggtagcatttgggccccttgaggtaggatctcatgcatttgaaataggccagtcaatatgcttgcgtatttttctcccactaagttcagctgcttggataaaggttcagaatagttagagagtgagatttaataagggttgagggttttttttcctaggtgagaattagggagtgaggaaaaaaggagctggagtatgttctggggagtaatggtaacagcacctacttgaatggaagctggataagaagagtgaggcaatggaggagttgagggacagtacaaccatgtattgatcatatatttagatataatcatgtatttagtttatagaggggtcaataatttttggaattggcaaactgaaaatgagaagtggtggttggaaagtaggattcttagaattgagataacagagtgcagttacttgtgtaaaaaggtctagggcatgactataagggagagtggatgagttaggatggaggaaaacaatccccagaaaagaggaggtcatggaatgggcagtccagggctttgcagggatttctctatggaaagcaaaatcactgagaatcacagctgaggtagtatgggagagggtgaccatgacccaggtgccgggatcttgtagaaatgaggggaatgacacagggctcaatagttgactatgacaaggagggtagtgggttgttcggtatggccgcatgacccttaaaaccgggagtgttgggggcagtggtatggaagatcagtaacgggcaaaaaggagtaatgggcaaaaaggagccctgcctcacctccaggcccagtggaacaaggggtatgggaatgaaaaaatcagctgccttttcagaggacagcaggggaaatggtgtctttgcggggagctttgagattttcttaggggctagttctggaacccagtggatgcggagccctcctaatgcttcctccctgttgttgcctctgttgctgcttcctggagttgtgtctttgaccacagaccattctgtactactgtatatcacagtggttacatacacagggtttgggctccaactgtctcgattcaagtcctgtgtttctaatgcactacttctcaattctgtgatcttgggttaattaatcgacctctttgtgcttctgtttcctcatcaaaagatagaatggtaatgggcttacggaattgttgtgaagttcaggcaatagatataggagctgtgcttgcactagacttgggacagtggttgcacatataaatgtttgctattaatataattatttttccatcacattctgctcttgatggcccccttattcggtgagggcagaaaggtaaggggaatgtttacagttgcaatcgaagataaagagattttgctgataatagatcatgcattccagtgacccagtgggtgggtttgggaagttgggggtagtcagattatggggttcacagaggtttaggggatgaaaggcagggtactgagggatgagtttagggagtcctgctgtcagaatggcagggctgggtgaagggtgatcttgcctggacagtgcagaactcaggggcctcctcttgactttgacttccactgatgaacatggtcagtgtggttcactggcatatccctggggtctagccaagctcttgctgcatccttgccaaataaacaaaagatgcttctgaggaggcacatgctgttatgagttttcctatcggctctgcttcttctaacacctcacactacccttttggaaatctgtctaagctcttggtcagattccctctgaatttcaccgagcatgttgacacacctctgtacctgtgattgtcttgcctgtaaatagttgtacttgcagttcacctcacccagagctgagataaaaggtgtcacataatgttcccagagtcctgtctcatattgcccgagcagatgctactgttgcagtgataaccaaaaatgttaaaattgagaccacaaggacttgttgagcattgtagttttctgacaggacagatagttcctttcttccttggctcaatgcttgagacttcatcagacacagaactttcctgccgctgtgccccacagctgcccatcctcacctgctcagggctgtctgctcttagattatgggctgtgctgttcagctctctggtgagctaattcaagacctggatcctagggtctgttgcagatggtcatacaggagtcacagactggatagaaaattacccacaggcatatgctgtttggatcacatagtgttttgcaaatcaggaaatttcatgcaaaattacagattaatgacttttttttttttttttttttttttttgtgggcagaggaatataaaaagacccaggcacaggaactctgacattctacatagcaaccattggctagagttgagtcatggcgccccctgcagatggagtacatactttaagtcattacatatccctccaagtaagcctcttgggactaccaatttttttttttttttttttttttttttgagacggaatttcactcttgttgcccaggccagagtgcaatggtgtgatctcggctcactgcaacctctgcctcccaggttcaagtgattcttctgtctcagcctcctaagtagctgggattactggcacccaccaccacgcccagctaattttttgtatttttagatagggtttcaccatgttggccacgctggtcttgaactcctgacctcaggcgatctgcccgcctcagcctcccaaagtgctgggattacaggcactcagcccaatttttttttaggtgccaaaataaatgcgagattctattttctgcttaggaacacccgtaggtggttatgtatttctttttcaacttttattttagaatcagggggtacatgttcaggtttgttacttggacatgttgcatgatgttaaggtttaggtatgattgatcccatcatgcagatagtgaacatagtagccaataggtagtttttcaatctttgcctccctctctttcccctctagtggttcccagtgtttattgttcccttctttatgtccatgaatacccattgtttagttcccatgcagtatttgtttttctgttccttcattaattcgcttaggataacagcctccagttgcatccatgttgcttcaaaggacatggttttgttcttttttatggctgcatagcattccatgatgtatatgtatcacattttatttatccaaactgtcactgatgagcactggtgttgattccctgtctttgctattgtgaatagtgctgtgatgaacatacacgtgcatgtgtcacccatccaagtactaaccaggcctgaccctgcttagcttctgagatcagatgagatcaggcatgttcaggatggtatgtccttgtgtctttttggtagaatgatttatttcttttgaatatacatccagtaatggtattactaggtcaaatggtagttctgttttaagttctttgagaagtctgcaaactgctttccacagtggctgaactaatttacattcccaccaacaatgtataagcattttcctttctccacagcctctccagcatctgctgtttgttgactttttaataatggccgttctgactcatgtgagatgctatctcattgtggttttgacttgcattaatctgttgattaatgataatgagcatttttccatatgtttgttggctgcttgtatgtcttcttttgagaagtgtctgtccatgtcctttgcccactttttaaggatgttatttgttttttgcttgttgatttatttaagttacttataggttctggatatttgacctttgttggatgcatagtttgtaagtattttctcccattgcgtaggttgtctgtttactctgttggtaatttcttttgctgtgtagttctttagtttcattaggtcccaattgtcaatttttgtttttgttgcaattgtttttgaggacttattcataaattatttcccaaggctaatgtccagaatggtgtttcctaggttttcttctaggattcttacagttcgaggtcttacctttaagtctttagtccatcttgagttaatttttgcatgtggtgaaaggtagaggtccagtttcattcttctgcatatggctagccagttatcccagcaccatttattgaatagggagtcccttccccattgcttatttttctaaactttgtcaaagatcagatggttgtaggtgtgcagctttatttctgagttctctattctgttccattggtctatgtgtctatttttgtacccgtatcatgctgttttgattactgttgccttatagtatagtttgaagttgggtagcgtgatgcctccagctttgttctttttgattagcatttccttggctgtttgggctctgttttggttccagatgaagtttagaatttttttgtgctaattctgtaaaaaatgacatcagtcacttgataggaatagcactgaatatgtagattgcttggggcagtatggtcaggctcttttttggtttcttgtgaattttagaatagttttttctaattctgtgaaaaatgactttgacagtttggaatagtgttggacctgtaaattgctttgggcggtatggtcattttaatgatgttgattcttccaatccattagcttgggatgtttttacatttatttgtgtagtctgtgatttcttttggcagtgttttgtaagtctctttgtagagatttttcacctctttagttgactatattcctaagtattttattcttttgtggcttttgtaagtgggaatgtgttcttgatttggctctcagcttgaatgttattggtgtatagaaatgctactgatttttgtacattgattttgcatcctgaaactttaccaaagtcatttatgagctctagggccttttggcacagtctttagggttttctaggcatagaatcatatcatcagcaaagatagcttgacttcttcttttcctatttgaatgccttttatttatttctcttgcctgatttctctggctaggacttccagtgctatgttaaatggggatggtggggactcttaatttctatattatgggtctgcttctcgtaggcattggaacttataactcaagccaaccaactaagataaaggaatattagagggcatgtgcagaggataaataatctgtgaacgattaatgactgcatgaaatatcgatgggtgagccagtgaacagcactcaaactcacctgagtatttgtgagagtaaacagcttacataatctcaaaaaaaaaaaaaaggcaaagagctaactaactgacacattctgctcttcctgaaaattttaaacttaaatcagaagcatggaaaactattgcttaaatctttaccttataccatggttaacaaagtataaaacgcccgattctttcccaggatagtggagagtttcacagttcccttttttctttcatgctgtagcaacaccaattatcacctgctggactcttaatggggtgtgtgtgtgtgtgtgtgtgtgtgtgtgtgtgtggtcaccggaagcttttgaaacaggtagtggggtattgaatgtttttttgccatagcagtgtaaaaacagaacagccacatgatggaggttgtttatttatttttctcaagaacaacttaccttctgactagctgtgatcttcaagtgagttatttaactgctctgagcctcagtttttatctctataaatctgagagtaatggttttatctctcagtgtttttgtgaggattaaatcatatgctctctgtgagtgcccagcgtagaccctccatcggaaaggtttccagtgagtctttctgttcaggacattcataacaaaagcctccgagcagagaacgagcccctggggagtgcccacacagtcaaccccaacagcccagtctctgaaccgtagcctcaggaatggggatgctgaggttctgccttctggcagtggcacaaacagaccctccagagacagcggctgtgcacctgttgatttgggttaactaccctgggggatttctcttcctccaagaataagaagtatcacactgctgctcagggtgttaatttctgccagggaataagtgaagaaaaattatttggccacaaccctgattctgatgtctatttgctaggggccatttccctttgggaagtgggctggtaagcctggattttctaaagtagttcaggtcaaagctattccttctctatgagtcattaaccctgttgaggtaataagtatttattgggcacaatcttgttgccatgggcagcgttaggctctgggaatgtgatgatgatcaagatacacctcaagtagctgacagtctagtgagggagatggataagtagatggacaattaaatacattcttctaagttctgctacagccagggaaaactcaggatcccatgggagttcatgggaagggcaataaaaccactttgggaaagtttgggaaggctttttgaaagagtgctatggtccgcatgtttgtgtctcttcagaattcataagttgaagtctttttttgttaaaattttttttttaacttttattttaaattcaggggtaaatgcacatgtttgttacagaggtaaacttgttccacaggagtttgttgtacagattatttcatcacgcaggtattaagcttagtacccattagttatttttcctgagtctctccctcctcccaccctccacactagggtagttcccagtgtgtgttgttcccctgtatgtgtccatgtgttctcatcatttagctcccacttataagtgagaacatgtggtacttggttttctgttcctgaattagtttgctaaggataatggcctccagcttcatccatattcctgcaaaggacatgatctcattcttttttatggctgtatagtattccatggtgtatatgtaccacattttctttatccagtctaccattaatgagcatttaggttgattccatgtctttgctattgtgagtactgctgcaatgaacatacacgtgcatgtgtctttataatagaacagtttatatttctttgggtgtatacccaataatgagaggaagtcaaatatatgttgaaatcttaatccccaaagcattaagaagtggatcctctaggagatgattaggtcaggaaggcagagccttcataaatgggattagttcccttataagtgaggtctgaagtagacccctcatcctttccaccatgtaaggacatagccagaaggcactgttggtgaatcaggaagggggctttcaccagacgttgaatcttccagcacactgaccttggacttcccaatctccagaactgtgagcaacaagtttctatagtttctaagcaatccagtttatggtatttttttaaaaatagtagcccaaactgattaagacaaagaggtaagttcaatttgagacacgaaggataaataggagtagccagaacaacaagggtggggatgacaattcaagcaaagggaatgggctgtgcaaaatccccgaagcaggtgcacacagcaggtttagaggctttccagtgctcatcgtgaccagagtgccgctggaaagcctcagagaggtgggtcaggaaagcaaggtcacagactgaaaagctttgttttccgtactagggagtttggatttattccatgaattgtttcagatattccaacagttttgggcccagtctgcatctctgagacaatttcacacatctagaagttgtacacatcttcccttttgaaatgcacggtcactatatctgcctgctcaggaatggttgtgctcttgatgcagaaacaagatatcctaggcacacactattcacgtttttgaaggcagtcccttatagatgtgctccatggtcagaacaatgcatcccaaaattcgatttggagaaactgacatctatatacatagcatgaaaaaaatcctgctgctcctgctactaccaatgatgttacctatcctcccatctctgaattttcaagagtttaaaatgtggcaagtgctcatttcctagacctcaaactcaggtttgcaaaataaaagacaattatctttttatttccataactgaatttgatttctacctccagctccatgtcactgacaatgaatgtttaatcttagccgttttaggaaaactaattaattcaacatttttctcaatcagatcacagctcccccttttcctcctccctccacaattgtatttaatttcgaggagacttgactaccaggaagccgttgggaattgtttctgattcttggccatcacgtcttctcttctgcatctctaccacatcctcactcccattggctctgttgtcaatgcccattttgctgacctcctttgcgatatccaagttttcatcttttccctggtggttagtccataaagttcactttgcagcctcacaagacaacaaggggacattagggctcatcaaccctaaaaatcgaatgggagtccaggtgcagtggctcacgcctgtaatcccagcattttgggaggccgaggcaggcagatcacttgaggccaggagtttgagaccagcctggtcaacatggcaaaaacctgtttctactaaaaacacaaaaattagccaggcatgatgccacacacctgtaatcccagatactcagggggctgaggcacgagaattgagaattgcttgatcctggggggtggaggttgcagtgaactgagatggtgccactgcactccagcctgggtgacagagtgagattctgtctcaaaaaaaaaaaaaaaaaaaaaaaaaaacattaaatgggaagcatctgacctacttttttttactgcatggggcctgggaggtcaagcctgtttccccggacccttcaggccaattctccatcactgtggctccatggtaggatacagatggagaattcccagaccttgcttatttgcctcagccctgctaagcaggtaagtgtgggttccttctgctcttgggcttatggttcttcccagcaccatggacttgaccccagaggatcaggacacagaggcttctctcagaccactcctagtttcaccctctttctacttaagagattttaatctaatatgagtggaggtaaaagctggctctgactggtcatgaaatctttttgcttaactaaactttaggccctgagtcttactaggctctgctttggaattccaaaatccctttcctgtcaaacttttgtctctgccataagttcaaatgttcatttggaaaaggaaatctaagcatgattttttttttctttttcctttttgctgatgtaacacccttccccaacggcagttggaatagaatggcctccccattggtcaaggaaaggtaggcataaagcagtccccaggcaaaactctcataggtgatctctaatagaatatccctctacaaaagagttactcattgagaattgtaaaacaagaggcactcacgaatattagactggactgcagcatggagaagacaagctgagtgttgtccatggcctagaatgctaggtgtaagggaaccatttactttcttctctgctcaagaggcattatcagaatgtaagtgattgaaatgcttggaatactctgcctgataagaatgtctttgtataccacgtgggtgctccacgtctatatgactgaccctcatagaaatcctggacatcaaggcttgggtgagcttccatggctggtaatattttgtgcataggcacgtatcattgcagagacaattaagccctgtctgtgtttttccactgagagaggacaactggaagctcatgtctggtttctcttgtacgccaccctatgccatttttattttatttttgcagattttgaatctgaatccttacagtgtaataaaccatagccatgaatataacagcttttctgagttttgtgagtccttctagtgaatcactgaacctgagggtggtcctggggaccctcaccacaactgagaacccgcaaagagagagatgccacctcttgccaagtctcagtctccctggcctttaaacatttattccagttggctttaggctggttcttcttcacgttaccgcttctgggaagttaaattttccttgtgatctctgaggtccctgactcttggaccactggcataacttcacatccttgttgttgaagcattccattctctggccacagacggctctgacttcctcattgtcaacgactcagcttccattcacttcaccaatccagtcctgttgtcacctcctataccttgttcctccccatcacttgggatgacccaacctgcaaaatctatatgctcagaagtctagctctgcaacccttttgggtcacacattcatgggcctgagtcttagagtcagagaagtccacagtaatctgacttttctgaattgcagttactcttctgcaaagtgagagagtactaaatgagaccctacatgtaaagctgttagcatgatgcctggtgcataaataccaagggttacaatgagagctactgttatcaagtctgtgatggttgatttcatgtgttaacctgacaggactacgggatgcccacatatctggctaaacattatctctgagtgtgtctgtgagggaagagattagcatttgagttggtaggctgagtaaagcagaagacccctcccaatgtggggaggggaggcatggctcatcctgttggcccagaaagaacaaaaaggcagaggaaggttgaactctccctctctttctgcctgagacattggtcttgtgcacttggactgggacacgatcagtgctcagacctttggacacggactggaatttacaccattggttttcctgggtctttgaagatggccaatcatgggacttctcagccactaattgtgtgagccagttctttacaataacgtcataataaatcatatatatacatgatatattataaatgttctttattataaatgttcttaattataaacattcttctctctatatatatctgtatctatatcaatatctatctatatctattgattctgtttctctggggaaccctgatttatatctagtcaaaacctacaaatacaaaaccttataccgaaatatgtgttctgatgtaactggcacgtgattttacaggctgtcagacctcacttggccttgcccttctccccttcctcagctagatttaatcacccgtccctgcaagggcactctcatccatgcccccatctcctctgtctccttgtcctccttccacagctgtgcctcccttccatccccaatgctatgtcaatccaactgattcttttctccctctgtgccttccaatgctgcagaaaaatcacataaccatgctgaattggttccattacaaatttatgagcttcccagcctcagctgtgctgccaaccctgctcagtcatcttctaatcatctcttgttgactttctctccctttcctttctgtggctgccctgacctccccttgcttcacccaacccaccatcaccccctattcccagccgaggctctgcagagaatatggaggtcatcagaagtgatttatttcatgtatgtcccttctaagtttttacttctaaatttgtctatatttttacttccttcatcattatatctgaaattattctactctcacatcttcactgtctctttctttctccgggctttcgcccagcacatacaattatgtattcatttcccctttcacatgcttttcccccatttctttctactttgcttccttttcaaagatctgccttgtaggttcctctcttaatcactcgtccactggtccttcacctttgcagcccagtggaatcctatgggggagctttaaaaaaaatctccatgattgggtgtgcattgtggctcaggcctataatcccggcactttgggaggccaaggagggtggatcacttgaggtcaggagatcgagaccagcctggccaacatgatgaaacgtcgtctctactaaaaatacaaaaaattagccaggcatggtggcgcgtgcctgtaatcccagctactggggaggctgaggcaggagaatcacttaaaatccggaaggtggaggttgcagtgagctgagattgtgccagtgcactccagcctgggtgactctgtcaaaaaaaaaaaaaaaaaaaaatccccatgattattccttatcccaggacaattaaaccagaatctgtaggtttggggcccaggcgtttgcattttcaaaatcttcccaagtatctctaatgtgcagccatggctgagagccactgctccctctgcttgtattcaaatctcagcctatgtcaatccatcttctttttgccacctccatactgaaaatgaacttcctaaagtcaccaaggatttcctcattctgaaattctgccaccaccttcaggcctcaggctattcaacagttatgaagcatgtgattcttaatacacattttcaaccttgtggacttccaaggcaatgttctgtcccagctctcttcccacttagatttctctttcattgcctcatttggcttcttttcctctcttggtgtctctgtgctaacccactttatttcactttacactttcttcggcagcagtgccatccactcccatccctttcttctcttgccttctctgttccttttctatcaatgtgctcagcattcctcctgctcccactaaattggccaagctaccaatacttggaggcatcactgacatttttctacaatccccgagggcggagatcagtgggaagaaggctctctcagagagatgtgtggttttatccttggggataaagagagccctgttaaatcagggcagaaggtgacacagagctgccagggtgctgggggtagggagggcatagggagtattgcttagtgggtacagagtttctgttttgggtgataaaaacttttggaaagagatagtggtgagggttgcacaacattgtcaatatacttaatgccactggcttgtacacttaaaaatggtaaaaatggcaaactttatattatgtatattttaccacaattaaaaacaaattaagaaaagaaacttgcaatgacaagagctggccatgtgaagacggaggggaggtgacgttcctaccagagcaaacagctggtgcaaagaccccaaggcaggaatgagcttggttattttgtggctctctattgttcggtacaggataactctcatgaggtgttaaagataagtttctttgtcctaaaaagactccagaaaggaagttgacttttagtgctggtaggggagtgaaggggtctaaatgcaatggtgaacttggggattttaaagacctctgactgcattcctcaggaaagccaaggggcttgtggagttgctggtttgcctctgctatcaggctgtgagcatcctaggaccacccaagtctgtgccatttcagttctgtctcctaaatctatgtctacttgttgaacaatgagctagggttaaagtactaaaccaagaggcagcagaaatggattacaaatgggcttgggctataatcccaaaagacacaatcctgaatgccgtaaatctgatggttgaaaccctgaacatcacaatcctgaaagatcaaaatcccaaaaacatgattcttaaaaaattaatttaaaaaattatttaaaagatatttatcaggccgtgcacagtggctcatgcctgtaatcccagcattttgggaggccaaggcggtggatcatgaggttaggagttggagaccagcctggccaacatggtgaaaacccatccctactaaaaatacaaaaattagccaggcatagtggtgggtgcgtgtaatcccagccactcaggaggccgaggcaggagaatcgcttgaacctgggaggcggaggttgcagtgagccgagatggcgccactgcactccagcctgggtgactgagcaagactctgtctcgaaaaaaaaaaagaaaaaagatatttatttacatttttaaaaagaggatgtatttaagaaacacaaaaacacaacagaacacttcacaggccactcgatacaacaaaatagacaacagcaacatacatattattgcaagcacaaacacccaggcttactaactacagtcacatgaatatgacatgagcagcagatgaaccatattcataaagaatcatgtcaaaaagtgaaatatatagatacatattactatggatggtgttgcgtgcatccagctttatacctgtgttcacctgaaataccgtgacaagcaacctaagtctttcaatgaaatccatcaaaaacagtgatgagtcaccattgcctatgcaatcacccaaagggcaaagatcttgagaaattttgcctttcacaaatgaagatgcacatagaggacatctcttcatttactgaggaagtttcaacgttattaattacaggcatgacgctgacacacaaagtcaatgttgcgatgatgcactttggtggagtcaaatttctgacgttccaggcagcagaagaaaagtctgtcccagctctcagtttgctgtctacatttttctctctggacccccagccaactgcctggtgcctgccagcactgagggcagatcttcccccacccgttccactcagattcacacactattctcctctggaaacacccttacagactcacccaaaataatgctttatctggattctaggtattccttaattcaatcaagttgacacctaaaattaggttgacaaatccaccccttgtcaacttggcgactgtatgcatctctttaaaccatacttaatttgcaaataaagacaatagcaaggtgtcagttccacctaatgtgaagccactaacataatgcaactatccctaatacaactgaaagcacactaatcccttccccagaatttggctttcaggatttaagcattgggaattctgtctttagcgactgtattagtctgttttcacactgctataaagatactacccaagtctgggtgatttataaaggaaaaaggtttaattgactcacagttgtgcatggctggggaggcctcagggaactcacaatcacggcagaagagtgggggagcaggcacatcttacacggtggcaagtgagagagagcctgtgaaaagggaactgtcaaacacttataaagcctccgatctcgtgagaactcactcactgtcatgagcacaacatgggggaaaccacctccatgatccaatcaattcccaccaggttcttccctcaacacgtggggattatggggattacaattcgagatgagatttgggtggggacacagagccaaaccacatcagagattatgattggcgccaattcaaattctagctccaccattaactagttgcatgtttatggataaatggctcagtctaactgagcctcagtttcctactccataaaatgtaggatttggatgatattaaggataataaatatatggcacacacattctctcccacacaccaggcagcagggccagatgttgatgtgtgggcactccagactaattggccctcatccaaccaatattacttacaaagttgttcaatatttatttatctagggaggatagagaagttgaaagaaaaaaaatttgtattggccaggagcagtggctcacgcctgtaatcccagcactttgggaggccgaggcaggtggatcacgagcccaggagatcaagaccatcctgactaacatggtgaaaccctgtctccactaaaaatacaaaaaattagccgggcgtggtagctggtgcctgtagtcccagctactcgggaggctgaggcaggagaatggtgtgaacccgggaagcggagcttgcagtgagctgagatcgcaccactgcactccagcctgggtgacagagcaagactccatctcaaaaaaaaaaattgtattaataaaaattatatttgctagtttacttcaacaaggctaatcagagtcactgaaaaactccctaaaatattcccttttttgtgtgttcttgttctctcccctgatttctttagtccatttcttgggagttatattacaacctttgaaatgtatttaataaaacaaatttcttcttctgggcaaaaggcactatatcatgaaatatttcaattgagaattttaacaaagtgggacttcatgagcaagttgcaaaagacataagcagagatgtgcttttaaaagtttcacttcagagtgctgtctgctttggtgggagtggaacaaattacatttaactagtctatcccagtgatgttttagtgtttctttcacatcaacattttccagcagctgccccagaggcttgagttcctgcagctgtccagggcagacattactaatggagcacagcactccttcctgaagagcctggatgcaaccccagcttccctggcacctgcttccagttatagaccctgctggccatccttgggctgggttgactctgcaattccttgcagcttcaatgttttaggagtctgtgatgttaaactttacatgataatctgagtaaccatttgtctgggacctgagaaactgacatgtaaatttgattttaaacatgtttaaatgaatgtttgtacagaagaaaaggatgtggaaaactgaaaaaaatctctgttaggtattttccaggaagtaacaattgaagacaattttatgaaaataatctggactaatgtcaagctatgttgagggcaatttaagacctagaattgggaggatgggcctagaacctggatggaaagagagatcttgtttttcagagataaaacagcattggattgggggtggaagatgagctaagaagatcaactgcaaaaactttatttttgtgagctgcatccagtgccaatctgaatttagctaaaatttgaaacagccaatgctgttgcagagtcacttttgtgctccatgtctaatgaggaatgtactgatgggagatgagcattgctttacagatcatcagacacagttttgagttctggcttctgtaattatttgttgtgggaccttgaagtaaagtaatttatctcgactgtttgcttatctgtgcagtgacgatactatcacttaccttttcatgtaataaggtttaaataacatcttgttggcaaatcacctaattgagtctaggaagaagcattacaaattgtcatccaatggtatttacaagttgagtgattgaatcatacttgattaaggagagcttcatatctactttccagtagggattctggtaaaagcaccatgggggggaccaacaaatttggaactggaaactgggtctgtgaatgtgaaatacgaatcggctggacaacccagtagaaaagggggccaagaacaacaagaaatcaaccacaaattaatcaaggaagtgaaaatggatacaatactttgtgtctttcaaattggggaatatctgtagtctcactgctagggggattataaatcagtatggccatttgggaaggtggtttggcagtttatcaaagttcctttcagcattgtgcctctctctccacataggatggttctgccctatacgaagcaccaagagctcagaaacaacctcaggaagagagagggagcccttgctccaatttatttattcttaatttatcaatttctgtcatattacatatgtattccattatgtcgtttattggctgcctcacctattggaatgtaaattcaccggaatgaactttactggaatgtaagagaagacagggatttcatctctcaggtccataggcatatgaacgtgaagttcagaatatgaatacataaaaagatcccacaaggttctagaaagacctgtatgcaattgttctgcattttcagtcaacagttggcttggaggtctagccatattggtacttatatatctacctaattctatttaacttttgattctgtcaacattgctgtattggaggggtagaaaactcaaattctacatccattatgtgggaaacctaaatgtgatgcccaggagaaaggtgtgttacaatcaaatatcgtgcctgcctaattatatggccacttcaaacattgtacatgccaagtaaaatcagcaaacagcacacacacctgagctatattttgcctaagaaccagcacttggtgaactttgctactgtcttctcatgtatttgtaatcttctgtgggtaaccattggtgttttaagttacttcctctttccctcccaagttggtactgacttgggttacatactttgggataaacttgagaacacaggagatggaaaaaggaaaatcaaaatgttagttgtgttaccttaaagctgattggagaaagaggctttagaactgtggccaaatggacttactaacccctacctcctaaaattggcagactcctgggcatagtcatgagtaccactgcttggctctaccctgtgggctggactgttaccacctggcaggtaaggagataggggcatacttcctacagctgatagacctgatcagacaggggcaagggctgagtctttagtatagttacttctctagttacttctctcaaatgcacttatcttactgttctttttttttttttttttcacttataagttgctgctcttcttatgcagagaaatcatgaggtagagaaaaaggccaggagtgttattctcataaaaattcctccccatagaactataagactagtggggagcttgattcttttaatagtaaccagtattttctgtctggaaacatgttcttatctctctgtctttttaatacagcaccttaactaagaaagctcttgcccttggtctctgttcacttatttttccagctatgtaacaaaaatcttttcattggtagcttccactatgcctacaggtcacacattctttcttctaagatagctttgattactatttctagtctatcggttctgatctattatcttatttattatcatttctcttatggttttaaactcttgatttttaaaatatgttgacttttggccgggtgcggtggctcatgcctgtaattccagcaggttgggagtctgaggcaggaggatttcttgaggccaggagtttgagactagcctggaaatgtagcaagaccccatctctacaaaaaaattaaaaaattgccaggcatggtggcacatgactgtagccccagctactcaggaggctgaagtgggaggatcacctgagcctaggaatttgaggctgcagtgtgctatgatcatgacactgcactccagcctggataacagggcaacagagtgaggctctgtcttttgatgaaacacaaaacaaaaaaactaaaatatgtttactttccatagttcatttttccttcccataactttatttcccttataaaacctttgtctctagcccagatctctatcctaggcttcagatccatacattcaactgttgtcaagttttgtgtatcaaaaagaagttcttatcttcccctcaaaaccttttctaccacctgacagcctagctaacctttagctcatgtggaggttaaaatcatactgacttcatagggttcattggaaagattagatcagataatgaaagtgattgttgcttagacgtcaagaaaaataaggacgttaacatcccactgcagaatttaaatctgcaccaaaaaccacaatgcacagttgttatctgtgacttcttcactattctatgttagatttgctgttttccttttttcttcatagctaaaaaaaggtcacaaagcaaggaaaatttcagttttttacatgtgttttaaaacatctacattctttatcatactcaatttatagtttagggggatataaaattctaggcaataagttttccctcagaatttgtaaggctttgattcattatattctagcatctaatgttgctcataagagattgtgtttctgatttcttattcttagtatatgacctattaatttttcctctgtggttacttttagaaccttttgtaaaaatccctggggttctgaaatttcaaagtgatgtgccttgtgtgactttttagtattcatcatgagtaacattttatgggctccttccatctggagttaggcctttcaattctgaagaatgctttcctattatttccctcaatgacttccttttctttattttctttgctgttttaagtccaagtatttagatattgcaatttcttaaaaatacttttttcttttctccactattttctacctcctgatcttttcacctatatattggatattccctcaacttcatattctattatcgaattttagttatcaaatactttactttttttttctttttttattttattattattatactttaagttttagggtacatgtgcacaatgtgcaggttagttacatatgtatacatgtgccatgctgctgtgctgcacccattaactcatcatttagcattaggtatatctcctaaagctatccctcccccctccccccaccccaccacagtccccagagtgtgatgttccccttcctgtgtccatgtgttctcattgttcaattcccacctatgagtgagaacatgcagtgtttggttttttgtccttgtgatagtttactgagaatgatgatttccaattccatccatgtccctacaaaggacatgaactctacattttttgtggctgcatagtattccatggtgtataggtgccacattttcttaatctagtctatcattgttggacattcgggttggttccaagtctttgctattgtgaatagtgccgcaataaacatacgtgtgcatgtgtctttatagcagcatgatttatagtcctttgggtatatacccagtaatgggatggctgggtcaaatggtatttctagttctagatccctgaggaattgccacactgacttccacaatggtcgaactagtttacagtcccaccaacagtgtaaaagtgttcctatttctccacatcctctccagcacctgttgtttcctgactttttaatgattactattctaacttatgtgagatggtatctcattgtggttttggtttgcatttctctgatggctggtgatggtgagcattttttcatgtgttttttggctgcataaatgtcttcttttgagaagtgtctgttcatgtccttcgcccactttttgatggggttgtttgtttttttcttgtaaatttgtttgagttcattgtagattctggatattagccctttgtcagatgagtaggttgtgaaaattttctcccattttgtgggttgcctgttcactctgatggtagtttcttttgctgtgcagaagctctttagtttaattagatcccatttgtcaattttggctttgttgccatttcttttggtgttttagaatgattgtatatctagaaaaccccattgtctcagcccaaaatctccttaagctgataagcaacttcagcaaagtctcaggatacaaaatcaatgtacaaaaatcacaagcattcttatacaccaataacagacaaacagagagccaaatcatgagtgaactcccattcacaattgcttcaaagagaataaaatacctaggaatccaacttacaagggacgtgaaggatctcttcaaggagaactacaaaccactgctcaatgaaataaaagaggatacaaacaaatggaagaacattccatgctcatgggtaggaagaatcaatattgtgaaaatggccatactgcccaaggtaatttatagattcaatgctatccccatcaagctaccaatgactctcttcacagaactggaaaaaactactttaaagtagtcaatcctaagccaaaagaacaaagctggaagcatcatgctacctgacttcaaactatactacaagcctacagtaaccaaaacagcatggtactggtaccaaaacagagatatagatcaatggaacagaacagagccctcagaaataacgccacatatctacaactatctgatctttgacaaacttgagaaaaacaagcaatggggaaaggattacctatttaataaatggtgctgggaaaactggctagccatatgtagaaagctgaaactgtatcccttccttacaccttatacaaaaattaattcaagatggattaaagacttaaactttagacctaaaaccataaaaaccctagaagaaaacctaggcattaccattcaggacataagcatgggcaaggacttcaaatactttaatttctaaaagttctttccttgttcttggacaattcttttgtgtggaatgttgttccttttgcaattcacagtccaggcaggtgaaatatctcctttcattctactaaagacgctgatacagatccagataaagatgtagatctttcctttgctcctggagtcatttctgcataacccaggtcccttatttatactagtttcattttctctctgtcgattagaggacatttcaagtgtctggttatcctttgctggccattttctttcctgtggcaaaatatacagcatacaaaatttatcatttgaatcatttttgagtagacagttcagtggtgataagtacattcacattgttgtgtaatcatcactgccatgcatctccagaactttttcatcatctcaaactgaaactcagtacccattaaactctaactccccattcccccctccctgcagcccctggtaaacatgattcctctttctcgaagaatttaactatttgaagtacctcatataagtggaatcatccaatagttatcctttttgtgtctggcttatttcactcagcaaaatgtttttaaggattacccatgctgtagcaagtatcagaaattcattcttttacaaggctgaataatattccatcatatgtctggaccataagttgtttatccattcatccattgatgggcatgggttgctgccacctttcgattattgtgaataatattgtaatgaaaatgggtgtacaaagatcagttcaagtccctgatttcaattcttttggtttacatttttttttggaaatggggtctctctattgcccaggctagagtgcaatggctcttcacaggcatgatcatagtgcgccatagcttcaaactcctgggttcaagcgatccttctgcctgagcctcctgagtagctgggacaatagtcatgtgccactgctcttggctctttcagtttactttttaaagtgagacgataaaaatttatgagaggccgtgtgtatgcatgtgcacagattgtcagggagctcacagtcgatgagtgggttttcaaacaaaccattcattagaggatcccaggaagagaatatctatttcaaagtcctattcattaggctcatgctttctcctctatatttagcagagatagctgaacgtttacagtatacagcacagcactcaggggagtgcctggaacttgctgaatgaatggtatgtgggtgtcattctttctcaactttctcatataatttccccatattctgatatttcactgatagttttagttgcaatttgggaagtcaggaatgggatggggagcagggagcagtcaagttatacatttgtgctcaatctgccttgatacttagaaattcctttgacacattgcctttagctggccctgggagcagagaccacattttatatgcacaagctacttagacaactgtgtggttattcctggagtaagtaaatgataacagagctgcctgcaggacatgaggtgggtgtgagggatggggaactgagagggaagaggcctcagggaggctgggcttcttgcttgggggtctctcctcctcttgtctcctgttttcagatgctctggtctgaccctttcatggggcaagctccctagtactgtaggtttcatgtggaaaaggtaatgatttattgtgatggtagttgaaaagtaaggctaacctcggccgggcatggtggctcatgcttgtaatcccagcactttgggagggtgagacgggtggatcacctgaggtcaggagttcgagatcagcctggccaacatggtgaaaccctgtctccactaaaaatacaaaaattagccaggcgggtggtgcacgcctgtaatcccagctacttggaaggctgagtcaggagaatcgcttgaacctgggaggcagaggttgcagtgagccaagatcgcagcattgcactcccgcctgggcaacagagccagactccattccaaggaaaaaaaaaaaaaaagtaaggctaacctccatgtgaggttttctcacagacagagccatggtgccattattatctccattccagagtttgaacaaagcacaaggataaagtcaggagggaaaaatgaagtctgagcagctggtgtttgcttcagcctcttccggagccgcttctgagccatcagggaataggaaggagctattgccattccctgcacggccccagtgcgagcctgggctgtgacgcacagatatggagggacattgtcgctggcttctaagtgatattcttcttccttctaatctccctattctgctgctgggaaatttatgtaaaatcaacgcatagctacttaagttttgctcccattgatgttattgttatttatttatttactccacacattcctagatggattatgtaagatttgacagtttctttcttgaagtcttgcacttttatctgcagaatgccatctgccatcatcagagagcagtggatgtggatgtgtctcaggaattagttgatgtcctgtgaactagatttgcataagcttctgcagcctctgctaacgagtgtaagatggttaccagggcctgctattatggagagtgattattaaacatgcagaagtctcaagctgggcgcagtggctcacacctgtaatcccagcactttgggaggctgaggcaggcggatcacctgaggtcgggagttcgagaccagcctgaccaacatggagaaacctcatctctactaaaaataaaaaaatagccaggcatggtggtgcatgcctttaatcccaactactcaggaggctgaggcaggagaattgcttgaacctgggaggcaggggttgtggtgagccaagatcatggcattgtattacagcctaggcaataagagcgaaactccgttccaaaaacaaaacaaaacaacaacaacaacaacaaaaagcatgcagaagtctcatactgtcttaacgtgtgacagaattgaaaccaactgtgcaaacatgcagaaaaacgtttgcctccttaatgttttgtaaacaactagaaatctgacatttcttcaaggaaagtccctcctgccccaccttttatataattcttgacaagagttttttaaacattttctttttattttttatggagataaaatttaccaacagtcaatacacagatctgaacatcgcatttgaatttaccaacagtcaatgcacacatctgaaactttgatgcttttaacagatgtatccattcatgtagtcaaccaacacccatcaagacacagaacaattctttgccccagcaagttccttgtgccccattccagtcaatcaccatgccttgcaagcaatcaccacctgctttgtatcaccctgttcctggacagagcaagttcctactgtccaataatgagatgcagacagactgggaaagaagggagttgatttctgcaactggcgacagggagaagttcagagtaactcaccagaccaactcaaagttgaaggttttattctagtgcttatatacatttaaagttttatgcctatgtgtggaaatgcacctacaagtagaagtgtttcattccatctatatctaatctttaactagggtctagggtttggaaagctttctctagaaccttggaaggtttttaaatcttaaatgggccctgcaacgaagtgtatgtgtaagaatgctattcttacttgatcagactttagggtctgagaaaccccaggtggggtcttaatggggttgatttacattccaggccttgtactcaggtaccagtttctccaggtctttaatgtctaacttatacactcataagaattacagtaaagggttagtggaaactgtctgttctggctgctcatggaaacctggcctgccaaaccctagagattcgtgttgctgcctgaccctagagattcgtgtcaccagttctaaaacttcacataaatgcaattgtccattgtcatcaggcactgtgcatttcttttcttttctttttttttttttttttttgagacagagtctggctctgttgcccaggctggagtgcagtggcgcaatctcagctcactgcaagctccgcctcccgggttcacgccattctcctgcctcagcctcccgagtagctgggactacaggtgactgccaccacgcccagttagcttttttgtatttttagtagagacgggttttcaccaagttagccaggatggtctcgatctcctgacctcatgatcaacccgcctcagcctcccaaggtgctgagattacaggtgtgagccaccgtgcctgggccaggcaccgtgcatttctttgtgtctggcttcttttctcatccatgtaattgtatactagtagtttgttctttttattccttagtagtatcatacaatactttcaatttcataatattttttatacatttcccagttgatggacttttaggttgtttccagtttggggttctcatgagtgaagctgataaaacacttatacaagtgtgtttgtggatatgtgttttcacttgccttgggtaaatatttacaagctaaatagctgtgtcatagggtaaatgtaagttcacaattcttgtcacatttatttctaattgttttatcattctttttgtcattgtaaataggatttccaaccccttccattttctaaatgtttttttctggtttataagacagagaatgatttttaaaatatttggtgattagagtctttgttagttgcttttattggttctttttttattgtctttttatttttgaaatccaagtactacctgaatagtctcatcataaaggattcaaacattgaaaagatgtaagaaagtcaaatacaaatgcaacccttcaccttcactccagctcctactttacccctggagatactgaatagtaacaatacaatgggttgctttcagattttttttaaagcacttcaatgtgtggttttgtaggatataaacagcacagggtaccacacctagacattgtagatttgtgtaggctggagtgcagtggcacgatctcggctcactgcaagctccgcctcccagattcacgccattctcctgcctcagcctccccaggagctgggactaaaggcgcacgctgccatgcccagctaatttttgtatttttagtagagacggggtttcactgtgttagctaggatggtcttgatttcctgaccttgtgatccacccgccttggcctcccaaagtgctgggattacaggcgtgagccaccgcacccagccgaagattcttaagtgtacatatttgtacacacacattatgtaagtatttatttagtggtgatttctacatgtcctgctctagttgctgtggaagcagctgtgaccaagggagacacagtgcctgctctcatgtggcttacattctaatggaggagcgcagactgtgaataaggaaacatttaaacaagatcatatttattgaattaaatgtttagtagaaaatagataaactcctatgctagaaaattactacttttggccgggtgcagtggctcacacctttaatcctagcactttgggaggctgaggcaggcagatcacctgaggtcaggagtttgagaccagcctggccaaccctgtctctactaaaaatacaaaaactagccaggtgtgttggcacatgcctgtaatcccagttacgtgggaggctgaggcaggagaattgcttgaacccaggaggtggaggttgcagtgagccgagattgcaccactgcactccagcccgacagagtgcaattctgtctcaaaaaaaaaaagaaaaaaaaagaaaaaagaaaatgactactttcaattgcgggtttaaggaagtgttttaggtaaaatctgagggataagaaagaactgactaatagagaccctgagtctctgaactagaccaatgatggggatttctttaaaaaattgaaatacctttttaacttttcccaggcattttcatagggtgaagacaaagggtaccaggatgtgaagctgaggaaggattttctgagtccacttctatctactattaagatgaaccccaattctccattttggcagttgtttattgatcaatcttagatttaagaattgtggggttctaccttttctcattcttcctgggaatctgagttgaacaattaagttgttcaattatggttaaatgttgaacaattagtattaatcaggtttttattaagatttgaacaacattgccttccacggtatactctctaacaagtacctattgtacaagtgtcctgtttttccaattaaggacagaacaatgggaatgattaaatttttaaatagaagttgagtaggttaatgtaattgcctggtgggttcttcttgcctactgcacagatagagtcaattcactgagttagtggtattgcattaaagaaagagtttaattaatgcaaggctactcaggcagaaggtgagagtttattactcaaatcatctccctgagaactcagaggctagggtttttatgggcaatttggcaggcaggggctagggaatgggtgctgctgattggttgggggagaaatcataagggtgtggaaaatggtcctcgtgcactgagcctctggctggggagccatgagttacgggtcttgtggaaaatggtccttgtgcactgagttagcctctggctagggagccatgagttatgggtcttggtggagtcagtaggttgccagaatgcagaagtctaaaaaatatctcaaaagaccaatcttaggttctataatagtgatgttatctgtaggagcaattggggaagttacaaatcttgtgatctctgtcacagtaaatgactatagaaaggcaagctatgcctacattttagcagaatgcaggcccctcccataatcctattcgtgtcgcctttcattagtcttataaaggcaagtttcaatccctgaataagaaaggggtcagttttagggaggggctactatcacccttgtggcaaagttaagctatgaacgaaattcatcccatagttagcttgtcctactccaagaaatgaatgagggtggccagcctgtgaggctagaagcaaaatggaatcagccatgctagactttcttactgtcatcatctttgcaaaggcagtttcattaagacaaaatatatctaaatataagcccactccactactacacattgtacctcctggtattgtttagaatgacttttcccctgtctttccttttttcagggccaatgtattcttcaataaataaatgtgacttgatttcaacacataagaatgaatgattgaagcgtcaaagttctaagccatggagcatggctgtaaaaactttactccaaatacttttaaaagcggatactatttaataaccatgtaggttatttaaaaagttgaagtgaagcactcataaaatgtctaattttgagaattgtaaattctcgtgtcctttgccaaagaaagcatttgtaaaatgtaattgccaaagaggttgctacattattttttggaagacttaacaacttagcaaaatacatgaaaaggcaacttagccatcccttgaaagactcggcaggactttaccaggtaatgaagtgtgtcctgtgtgtagggattggggttgaagagatatttgggggaaggacagagagttaaaaggtggaaaagtcactacaagcagatggagaagcagggacggaagtgtggaggtggagggaacacatcacatgtagaaagacagctacagtttgatgggaagtaggatgggtagattgtcaacaccattagattgggagctttgtttatctaattcagggggttggctaactattgcctactcgccaaaagtttttgtaaataaaggtgtatcagagcaaggtcatgcccttttgattacatattgtctgtgactgcttttgccctacaatggcagagtggtgcagaaaccaccactgctgctgcggaaacagtgtggctaacgaagcccaaaatatttactatctggccctttctagatgaagttgttgacttctgatctaactctgccatgtcccctggtatggagattccagtgtattgcctggcgtgtggtaggtgctcaatatactggtgattcatattgaattgaagcattcgctggtattcagataatgaaggggcctattgtggttctttttgttaagaaggtggagctttatcttaatggtaaagcattttgagccatgtattcatgcacgcattcatttattcattctcattctttgagactcacctctagcctgaactggcctccctctactctgtctctctagcaaactgggcaaaacattgatcagactgtttttctgtgggccggtttctcccctagactgaactacttgaaggaaaagggtatttcctttgtctctgtattcgccaggcatgacacaatgcctgcaaccttgggggaccttgataaatattctttgaatgaatgaaacaaacatttgtcaagcactattttgaatgaatcaaaaaatccagagataatgctgatttgaggagacacttgtgttcataagaattatgtggaagtgctttataatctaaacagaactacacaaatggaaaattcttttattgtttagaaactctttctacttctatgtatcttaagtgtgtaagctccttcaagaattaatgacaagaaaacagatggagtttggggccagacagatctcagttcaaattctagcttttcttcaatttctaataatgagcaacttggtttgcactagcctaaaccaggatcacttttttaaaaaaatatatttttaaggccaggtgcagtggctcacacctataatcccagcactttgggaggccaggcggttggggggcagatcacgaggtcaggaattcgagaccagtctgcccaacatggtgaaaccccgtctctactaaaaatacaaaaagtagctgggtgtggtggcaggtgcccgtaatcccagctactcgggaggctgaggtaggagaattgcttgaaactggaaggcagaggttgcagtgagccgagctcgtgccactacactccagcctaggcaacaagagcaaaactctgtctcaaaaaaaaaaaaaaaaaaaaaaaaaaatatatatatatatatatatttaaaatttcaatagcttttggggtacaagtggtacctgaatgaactgtacactggtgaagtctaagatttagtctgccggccacttgagtagtgtacattgtacccaatatgtagttttttattccttacctgccttccaagtctccaaagtccattattccactcactctgtatgcctttgccaacccatagtttagctcaagaggctcacctttttaataatgcaaatgcaaatgaaaacttttattgagtcccatggaagaatgttcatccctactatttggataacccacatttttaaacagaagaatatccctgagaaaagtggctctgcttttagccactgagtgtctttgggaagcaataacgcacagggttgttttagaaaatattttgtctcacagatttctttagcgttcaaagtgagtttacatgcactatctcattcaatcaccaaaatacacagtgaaatattattaaatatattaccccagttaaacatagagctacctagcaatttcacttgtaagtatacaccccaaataatttaaaacagatatttaaaaaaaaactcgtacatggatgttgacaaaaacactattcatcatagtcaatagaaggagaaaggacaaaatggtggaaaatgcagaatctttgattcccgggtggccatatggccatccatggtatggaactccaggtgtgctgtgctcagttactaaagaaaacattagcagtgaaatttaaagatgaattcaactcctggggagttggttcactggatacataaggaaatgcaaaccaacaaggaaaaagtgaaatatttaaacccttggttatcgttatctatagtagctaacatgaaagtaaaagagtgctgggttgggccttgaggctgatgtgggtctgtctgagctcatgtcactagcctcaaagctacccacaaagggggaaagttatgcccaaggcaagagatctgtgagtaccaagaaggtagtcaacacaggggagggcaaaaccaagtaactatggaaaccagaggggatagtgtgaaggaattgttccatttagtagattggtatcatcagctcacagtggaaccattactaaagtgggtagtgagaataacatgtttgagatgtgtgtctttgcttttaaatgctgcagactaaaaaaacgtttgggttgattcaggccccacagctcactattgaataatcgcagatatgtgatttagacacacaggtgggtattcccgagggaacagccagcctgatgggctggataaaagtcctgtaaggtctgtttaccctgagaaggcagactgctcaactccacccacaaatgccaagtggataccccaggtaaggcagctggtgagttttgtatccaagccatgtaggactggctaatttataatgacagggatattcacccactgaatgtgcccattctccaggtcatggtaaatgctgtggttaaggggaccccttttgcttcggcacctcattacagccgcaaaaccaaaagacagtccaggaagccttacctaaatttgctgtctcaatttcccatttgctaacttcaatgtccaaaacactgatggagtgaaactcaaaggaaaaaggaaaggagagagtcaatggaaattttgaaaataattattaagaaatgcagtgagtaaaatgaaaattaatgggttaaaacaacggtcttaatacaaggctacagaaggttgagtggaccaaagttagcccctgctagttccccgatactaaagggcctcaaactggttttctatatttactccagagtggagggaaaaaaatcagaaggcgaaaattccaaagaaaacgtcggccaactattgctggagcaatactgaggcaggttaatcaacataaagagggagaaagggcctggatcccttggctcaactacctgctggaaacgcaaagcctttttctcaagacagggttaaatggtcttgaagaaagttggtcttggagaagaaaagtttctgggactagaaaataaaatggaaaggttaatacgtttatgaaggttagaatatttaaacaggctttatgtaaagtacttgtgtcttcttcacctaaatgtttttatgaaaaacattctgatgggggactttgggaagagaggaatattttgggactttgggaagagaggaattcatacaggtattataagcacagtctaatggtgagtgtttggcttggcttctggccttgagggaatccaaaatttcttataaaagtttcagaaaagccaacttaaaaggagcccatgactgatcactatttttgtgacactttatgcaaataatcaggcaaagtagaataaaactaaaatttattttgcaaataaatctgtcctactatgatttatccttggcagaaatggggagactggagagagaaaaatttagattctggccctggccattgttttgaagtttttattatttgcctacagtttgggctgatcctgaattgttttctggctgcaacaagtctctaaagaagaaccaggtttacttttttttcacaatgcttttagttgccttcttaatggaatggcttctttttttgttgttctggcttacagattctcttttcattgtaatcctgtgtgcattatatttctactgaggactaagctctgatttttatctaacacaaatttctacctaaggggtctagggagtcatgccctacaaaacataaattctcatcagatgggttttatttgaccctatatatagtgacttacttttcttttctttctttttttttttttttttggagagagtctcactgttgtcacccaggctggagtgcagtggtgtgatctgggctcactgcaacctccacctccagggttcaaccgattctcctgcctcagcctcctgaatagctgggattacaggcatctgccaccacacctggctaatatttgtgtttttagtgcagacggggttttaccatgttggccaggctggtctcaaactcctgacctcaagtgatctgcccgtcttggcctcccaaagtgctgggattacaggtgtgagccaccatgctcagccatgacttacttttcaatctcaccctggcacaacattatgagacaaggaaaaaatatttaaccccaaactacatttccttgccatacctttgccctgcaaagtcttttgtgagaacaatccacattctatagagaatctcctttcccctttgttttcttttcttcctttgtagatccaggagataataactaagagccaggcacccttttaggtctaataagaaatattttacaacctgctctctctctgaagtcggctatctgaggattcctctgcataataaaacctggtctccacagtcctttatcataacctgaacattcctttccattaatcctaggtcttcagaaaaactcaaccaattgtcaaacagaaaatgtttaaatttacctgtagcctggaagcccccctgctctgagttgtcccaccttcctaaaaccaaacccatatatttcttaaatgtatttgattgatgtctcatgtctccctaaaatatataaaaccaagttttacccccaccaccttggacacatgttcttaggatctcctgagggctgtgtcacaggccatggtcactcattagttggctgagaataaatctcttaaaatattttacagagttttactctttttgtcgacattacaatttaaattactaatgttatgtatctcattgttttacttctgagaaaaacaaagtcaccgtattctgaagactagagctgattaaacagcctgtgaatctccctgatttggaatcccactgggcctgatctgtttttcattggcaaagcacagctgctaaagctataccacatcaagcatcctccctaaaggctgagggaacatcgtggaagagcggggaatgtgagattctaagaaccagattgtggatggagtgtgtaggtcagaacaacttgggtgccaatcagccatgttggcttctgattaacccctgttctgagaatgtctgtaagatttctagtttatccattgttccttgtgtaacagcaagtacttatcataaatcctgaccttaggtccaacaaccttgagattatagtacttcaagtgttctacatatcccttctgaatcaccctttctttatggtatataagccctggctctggggggtaacggcacaaggatctaccatcttaccttgccgcttcctgagacacagtcatggtttctgtttgtaagtccctattaaatgttcctgagagactggatttgtcaacctctttctttggtctttcagcttccttggactttgggagtaggtttgcccagacctaaccatgttggaacagtacgaataaacaaaatgttcacagttaccactgaaattacaccacctgtgatgaaagaaagctgggtgggcattcactcaacaatggccatccattgctcagcattatctgtcctaatggcttttttgtttgtttttttgagatggaatcttgctctgtctcccaggctggagtgcaatggtgtgatcttggctcactgcaacctccgccccctgggttcaagtgattctgctgcttcagccttctgagtagctgagattacaggtgcccaccaccacgcccagccactttttgtgtttttagtagagatggggtttcaccatgttggccaggctggtcttgaactcctgacctcaagtgatccgcttgcctcgacctcccaaagtgctgggattacaagagcgagccactgcacctggctttgtcctaatggcttttgctgcccattatccccacctcaaatcttttgttaacatttgctcagccattctagatttttgcccccaacacccttgactcttggaaccttgtgggatgctaaataactggggaaaggcagcaaaaaggcagattgctcacgtgaaacatccaagggtttatcatcaagtttcacctttggctctaatccaaagcatatatctcttattgattctgtggattttccagttttccttccatttgaacctctgtgcttgtgaaggggtcctcaagggctggactcagcatgataaaggttggagttaggacttatctgcaagtgaccatcctacatttgaaggtcaagaggtaagaggcaggggctcacctggaggaaagaggcaggggctcagagaaggcttcttctttgtgcttgtgctctttgctccctctcccatatgggatgggtcccacctaagtctcctgtgtgtaccattttcatcattctccctcatacttacacttggtagaagaggaatcttcctgcagcataattcttactccccaagaggagattcagtggggaagatgcattaataactctacaaatctcgagattggactcactgttattatgggagaagatctgaatatgtcctcttatatccagatgaactagaaccatctcatgggacaagataatgagcttagagagttttacaggaggaaaaacatgagcttgttttagtattatagactaatgcagagaccaaagctgagagactctatgtgaacctgcccaaatcagtcttaacccttagttcacactcaataatactggccatttcatttatttatttcttaatagatttactgattttctcaatgctaagcagatggaagctgcatctgctgaggggaaacattccataggttaatttctttcctcctgactcagaaagagggaattcctgcaactgctgaagaattttgcacactctagtttccctgctacagaaggccaaacatccactgagtcctttctgaaggtgacttctttgctctttccccaaatgtctaagccacacaggctcctgcactcctctcaggtttctaagtgaggggtaagctgttctgagcacagcccaggcaccccacacagcacatgaaaatttgatgtgtgcaataaagcctgtcttgcttaatgcattcagcccttttgtccgtgggagctaatatccttttgggaaatactgtgatttcagctgaaatgtcggggaaggggagggcggagagggaatgtgggactctgccatacaaccccttactccaaccacttaataacttggctaaaagccacgatcgatatagagctgtcagctgggctccagccctcccagccttcccaatcaatcaacaagatttagtgagccaccagttggaatctatgtcacataaaaagtgtgggttcctagaccagtcctagagagactaattaattcctcctgggcacttgcattagtttccacttgcagaatagtagcctattgatggaggcccagctgttagaccttcccaagtgtacctaggacaagtaggcattttgcatgtgatccactcatttctgcattttttctcactaaacataactcttccatcagttaatagtctatttttttaaatggagttgtggttgaggaaagggaaagattgcagtcttactaatgtgccaagtttttacattcatttttgaacttattcttccatgaggtatgctataatttttacttaagagatagttgtaactatgactcatttttttcatatgaggaaatcgtggcaaggctgcccttccctccagaggagccaagagtgaaccccgagcagtgggcctaagacctcagctcccagaaaacctatccagccttgataaggatcaggaaggagtctctggagtttggaatgagactgagcttctccagcctcctcacctccaacgacagagtccagagtcagttctagacacacacccttctctgcgcttcaatgctttcagccctactactaattgccctgagtccttcataacaaatctcattttcccctgtatctctgttcaattccactacacacaaggctccagattcctaggttaccatgtttcttagcccattaactccccaaatgcactccatattctcatgcatttcctatctatcctcatctcatggaaaccatccatggtgacatcaggaattcctggtccatcattagccaaattctgtgtcttcaacctttcctctggatggaccttttttcttcttgctgtaacggggacctggctttcattgagggaagttttctctgccactctctaagtgatggcttgcttctctcccatcccttttccttatacctcagagtctcctggtttgtcatttcttctttcagaccaggctttctcccaccttcattcaaatccccattgaactctcatgttatcaggctatgtcagaccctatcctccagtactacttctcttgaccaagcactcaggtctcacacttcttgacagttttgcatccttgaaggccatctcactgtctccaacaccactctcatcttaattcttgaagatttcacaaaccgttagataattttctctgttcttgaattcctctcctcccttgaagttatattctaccctagcttggccattcactcctgtggtcttatcctagaactcttcatgatcaatgattacaacttgtcataatgtctattttatgcaactctttttgaccactacctcctatgttttaactcattgcgtctaataactaactctaacaattttccaatctcgcagggacagtccatccactgatctgatcattcccctgcccactgcatcgtgatgttatggcttccctcctcatgcagtttaaagtccatggctgactattatttttatatccttgtatgtgccttcaacttccttgcatgtctcacactgttttattctccctgctccatgcctgcacccatgcagctgaataaggcttgaaaacaaaaaaaaaataaacctaagatgattcttttgttgactcatgactacaaacataatgttgggagcagtaatatatttcctagttcatccattctcctctctcaaataactggttgatatcttctcctctcacctcagaaatcccctaggcttcctcacatacccgcactattggctgatgacttacttcctgtatcactgggaaaatgaagcaatctgaagagggcttcctcaaattcccaccaccaaatccatccacttacggcatctgcaccgtatgctttaccttctggaccatttttctagatgaactgtctgtgttcccatagtaagccaatcttgtttttatactttcattctatccgttctcctctactctgtgacatcacactggcgattctccctgctgtcttttacagtgtcagtttctctccctctccagtaacacactgttacttgttccatcttacagagcaaaactttctattggccccacttcctcaccagctactgcctactgtctccgctcctttttggatttagcaatagcctggacaaagtcactttgatggagtgattgaagcaaaaaacaaattggagcaggtttaagagagaaggggattgggaggccgaggtgggtggatcacaaggtcaggagttcaagaccagcctagccaacatggtgaaaccccatctctactaaaaatacaaaaattagccgagcgtggtggtgtgtgcctgtaatctcagctacttgggaggctgaggcaggagaatcgcttgaactcgagaggtggaggttgcagtgagtcaagatcatgccactgcactccagccagggcaaagagtgaaactccatctcacaaaaaaaaaaaaaaaggaaagagagaagcggagaagaggaattggaagcaattacaccagcagtttagttatcttaaatttagtgagttaaagtcacaggaaaagaacctgggaacagtaggtttacatttatatgatgctcatcagaagccaggcatgttcacaggactggaatacagatggaggtagagagatgcagaactctgctctttctctcaaagagctctggcctgggacagagacagggatgaacagaatgggttgggcaggctggggacttgactgcatgctaacaaccagacagaggtctttgccctacctttgtctgccgtagacttcaacttgtagacactcacaactttgctttctcaggtgtccacactgtttctttcttaacctcacctgagctgcacatcttccaggcagaccaggctcacctaagagcagacttgaccctgtgctgagatggagcatgctacttcacccagccctcgaggctgcagggctggaatcatatagtgggattggccttgcttctttcctgtgctctcaagggagacgaactgggcctgccctccaggttttgtctcttgaactcctggaatatttttctcccctctaagggagaagagcagctgcagttctatctatccctccaggtctcaaccctgctcttgccataacatggatgcccatggatggatcctccctttaacagcccccttcctttctttctccagaaaacatgttggaatacaattgaccaagagtaggatgattctaaggatgactttggtgcggctttgattcagcttaaaagtaaattacttgcaaatattgacattttaaccaccactaataacttatgactagcattctcctcacaaggaataagcccactccctgtagttgagactaaagggctctcaagttcagctaaagtacaagcagggttcccacaggtcacccaaatgggcaaaaggcctgggtgggaactgtaactagcctgcagggggccaaagtctactttcctccagttcattgccagtgttgactgcccagatatgacccatcttctgagttttccacaaaagctggaaatctagattttcagggaaatctgctttataaatgttgatgactaattaaaaatcttcaaaaatgctgggcatgacaaacaaaatacaactgtaatctgagtttggcctatgggcagatatccagccaactctgctctccgacctctgagtctgggcattcccaagatggcctcatcgcagcccttgcagctctgtgtgtctacctgagatcccacccagcttcccaggtcagtatttcagcaccatacccttatatcaagtttcttccttgctgtctggggtgactgggagaggaggggctcctgcatcccagaggtggagagaagtgaagagagagcaaagttggtgtttttgtttgttttgggttggaggaaggagtgcacacagcctgatgtggagcagtcttgcacttccctggggtctgacgccagaacagcatccgccattgtcctgttcccctgagtcagtgtacggtgtgaaggatgatgcagaaggatactcactcactcactcaccactcactcactcacctgttcattcatttgcttatttattcactcattcattcactcacctactcactcattcactcattcattcactcacttattcatctgcgtattcactcactcacttacacattcactcattcactcacctactcactcattcactcattcattcactcacacacctactcacgtattcacttatttattcagtcatccattcactcactcattcacttatttattcactcattcattcactcacttatttatttactcattcatcactcaccaactctttcattcactcactcatttattcactcactcactcactcattcattccctcaaacattcattcacaaagtatttataaaacacctgtcaggactcttgtggacattaggaattcagcaggggaaaaacaatcaagaacctgccttcctgaggcttacattctggtgaggaggcagggatgaacagacaataaacaagtagatgtgtcacctaatatgtatctggagctgaaaactgcttttaagaaaaataaggcagataaaaggcaaaaaatgattagtttaaatggaggaaagagaaaggccagtctgaggaggtgtcatttaagaaagatcaggaggaagagagagagcaagccttctaagtactcaagggaagagcttttcagcaggaaggagagcaagtttggaggtcctgagtgagggtgtgtttggccttccaaggaatagcatgaagactcagagtggctggagagaagtgagatgatgggagggcacagagaggactggaaaggaaatcaaagaccaggcattggacctttgggcagtgacatgatgggagcctctgaaggatgaaagctgaggggaggcatgatctgatttccattttaaaaggatccctctggctatggtgttgacaatagactacgggggcaggcgtggaagcagggagctgagtgagcaggctgtttcaggggtccaggactgaaatgatggggacctagactggatgccagagggggagatgatgtctgctggatttggtatatatgtatatatgtatatatgtatatatgtatatatatatatatatatatatatatatatatattattttttttttgagacagtctcactctgtcaccaggctggagggcactggtgtgatcttggctcactgcagcctccgcctcctgggttcaagccattctcctgcctcggcctcccaagtagctgggactacaggcatgcaccaccacgcccatctaatttttgtatttttagtagaggcagggtttcaccatgttggccaggatggtctcgatctcttgacgtgtgatctgcctgcctcggcctcccaaagtgctgggattacaggcgtgagccaccgctcctggccgatttggtatatattttaagaaccaagtcaataggctttgctgtcagttctctgagagcccaggtaggcgtgtgaggggaggtgctcacatgcacacactcgggcacgtgtgttggagcacagggctgtgtgggtacatggtagaatgcagatacacgtgctggtacagcagcttcaccctttccaagggcaggagaggcagatctctgttctttggcgcttctgctgtgttcagctgctttcagcaaccccagcagcactcctctgccccagtgctgcatcattgtttggctgccaaggccagaccaccattcccctcttctcccagtagcatcagggtcctgagacatacagggaagtactttgtctcctaccccactcagggaaattttgagagtaaacacccatcccacatccctctgccagccattgctggacatgcctgtaggctcttttccacacatcagaagccaggaggaggttgaatcaaatagaaagaacagacacatgtgaccatgcggcctcttcgcctcttcgcagcagtgttattgactaaagcctggctctcttctttttctttagtcctcattccttgagtgagttcagcccctcttacaacttcaaaactaaagagtcactctctaggtgactccagatgggccctctggcttgtattctgacttcaaatgacacatccatttgatgggcttgaaggtggacatgaagaatctgcaggaattcttttcatactctttctaagagtctagttccttggatcaagggaaactctgcttgtacattttctaaagtttacatcttagagcctccaaaaatacatattttctccctcccattatcccttcattccatcttttttttttttttttttttttttttttttgagatggagtctcgctctgtcatccaggctggagtgcagtggtgcgatctaggctcactgcaagctccgcctcccaggttcacgccattctcctgcctcagcctccagattagctgggaatacaggcacccgtcaccaagcccggctaattttttgtattttttttttttttagtagagacggggtttcaccgtgttagccaggatagtcttgatctcctgacgtcatgatccacccacctcagcctcccaaagtgctggaattacaggcgtgagccaccgcgcctggccattcagtcttagagttatacttagaagaggcacaattggctgttggaaccagaaagggacttagatttgcacaaatctagatcaaaattcttagatcttaaatttaccaattgtgcaatttgaactagagacattagttttcctcatcatagaatgaggacgacaatatctaactttagagtttttattaaggttatacacggtcttcaccaaagactttacaaaactttacaaaaggatcctagttgagtaatgtaggtatgttgggatcccacagaagaggaattgttctgcaaatttctcttcccttttaaggaaagagagaacagtgaggtattgatgactttgcagaaaagttgaatctctgggctctaagctgaacttttatgaggtcagggaatattttctgtgaaatcactgggttctgcactgtggctggctcatagtagggcttcaaaacatattgtcagatggacagaagaaaaggaagtagggaagcaagggaggaaaggttagaaggacagaaggaatgaagaaaaaaaggagagtttagtaggaatcaatcctgtatgtgaagccttgtgagatgtatgataaagtctatttcattttgtgggtgggatgttgaatactaggtcaagcttttttttcttctatgacaaacaacacagagaaagggggaggggaagtctgcacagaatttttactattatttttaccaccagacaattaggcaggttcccttttgttaaaattcaaagatttttttttccatctggggagaaatagttttagttatatggcagcttcaattctaagccagaaaaatgatttatgaacagaaacatgaaacatttctttaagaataaccatataatttacagccccaaatgattatattaagggtttagttaatgttatgccttctttgaaacagggagaaagtggcagaaccactgtcatgcagtcatactgaatagccaaccagtgggtgctgcaaagtcagctttctcttgattgcattggatgttggttccaagagctgccgcagctccccaaggttgatgttgccagggctgaatgaatacggcctttgcgtttccctggctactgaactcaaagtacagtacaaggcgggttctccccacttcgactaactagtgggaacaacatcttcagaagcatcagttgcattacttattagcaagtctactgcatcctctccatttagagaaaggaccaccatgtcctgggaaggagaatattaatttctttccttcttgtgcaaactcctttagcaattcgctccttctattcatccaaagaaacttctgggggcttcttttatgtgtcccccgaggcagttctccatgcacacgacaatggacataatggctgctgtagaagggaatcaatttctccttctattcataggaaaaaaaagtccatccttctttccaataccattgctgtttcttctcccaggaggaggcattgacttacccaactgctaacactggagaaagaaacctttcctatgtagcttagccccttcttgcttctgtttaggatcttagctgtgtgcgctccattcctattttctccattcagtaaaagtcctgtcctgcctccttccttgctgtgtgtggtggcgtgagtgggtgtaggagctgaactaggaggtagtttccattgtggagggtaattacacagcaaggactaagcatttttcccccatatgtcttaccataaataaatttaatgttgtcattaccatctgatgtttgtctcagttgattctgaccttgaaggaagaggggtatgctcattggcacccttaaatttaagcatctgtcttaaaggagctcatagcctaattgggaagacacactggtaaactgtcaatcaaatagtaagggtgaccagtatcagtgaaaagcagaatgaataagaattagccagatgaagtaaaatacaagcaatcagtatgactgaaatataatgggagatgggaagcaggagatcaggctgcagagattagcagaaaccaggtaataaagggcctcatcggtctttgtggaatagtttggattttatcttgaaaacagtgggagccactgcagggctttaaggaagagagtgaacaagtgaattgagcagatttagaaagatttttctgactcttggtatggagaataggttggagagaggcaggtttgggagggttttttttttgttgttgttgtttgtattttttgagacagagtcttgctctgtcacctaggctagagtgctgtggcatgatctgggctcactgcaagctccgcctccccggttcacgccactctcctgcctcagcctcctgagtagctgggactacaggtgcctgtcaccacgcccggttaattttttgtgtattttcagtagagacggggtttcaccgtcttagccaggatggtctacgatctcctgacctcgcgatccgccctcctcagcctcccaaagtgctgggattacaggcgtgagccaccgcacctggccgggagatggggaggttttaggagactattgaaattgttccaggtgagatgatgatagcctgaactagggcattggcataggtaaaagtgtttggatttgagacacatttaacagataaaattaagaggatttagtgagtagttaactaggtagaggagtcagagaaagaagaccttgatgactctcaggtttctggcttgggtattggtggatggtgcatctttcaagaaattaggaaacccaggaggaagaaacacgtttggaaaggaagatggtgaattccactttgcactattgaatgtagatgtcagtgggatatccagtgagggaatttgcttggtagtgtgttcatctcagggagaggtataggctggaggcgatggatgtgggagccagcaagctgcatatgacaggagagatctcacagcacaataggtcaaatgggaagagaactgggtaaaggatagaacacaaaggaccacaaagaacagaatgaaggcaatagagtcagagaaagtccagtcaagggagtaaaaggaaaaccaggaaaggtttgattcagtctatacgaagaataggggagcacgttgcttatgggaacatggaatggttcttggtaagaattgaggaactatttgcattttgagtccattaaggtggctgggggcagtggtgggaccagacatgggtcttattaccaaataatccaacctagaagtctatagcattcctttctgatagtccctcctccttgcccagcctctactttaggtcatacctttaaagtagcactagttagttctgagtagttgaggacactcagggcctccaagcaaaaattttaggaaaggtctatttatccttcattagccgcaaaataaactgatattccatggccttgcagttcagggactgctgggttggtgtttacatgtgtggtgagaaatgcttcctgctgtctcttctaaagacactctcttatgctttgcactttctccagccagttattgcacatcagaaacaccaggggagctttcaaagctttgggctccctggggttcaccctagtccatctttattagaatcttcagtggtggagcacaggcattgacattttttaaaagcacctccagagtttctaatgggtagtcaggactgtgagctactgatccagccagactcaaaccccatgagtcattaaccttcaccaagttaaataactaatccgccacaaaggaaaaatcctgcaaatctggagcagctgtcgatagtgttatagaaagtgatttgttttcatcctggagtcttccagctgctggagaagctgaataaccctttatgggactggacaaattcgagaaggactaggacaatgatgtctgggcttgtcttctgggtccccttcaacctctgactacagtattgcagtattgctacctaaagagccagggtggagatttcagcaaacatttggtaataaaatcccaggggattggatcctgccgcatgcacacccctatgaagattccactgggccagaattccacggctgcacatgttctgactcgcaaattcttagacccatcttcacctggagagaggtcaaaggtgatgtgctggtaattgtgaatctgccttaattatggcaagttaagttttgctaagagcagatttttgggtccagcactgtcctacacaatctagccaattctaagccccaatgaatcaaagaactgttaagctctgccaatcagctgggctcccacgtgtgacctgcagccactcacactcaagcatcagacatttgtctgtattccttttggtcaaacagaatattcaccactctccagttctgtggacacctgcctaggtgaacactggcagccatgaaattctgtcccagtggaattttcacagtggtgtaacccacaggcagggttcttaaggcttcaaagggcagaaggacaagctcacctttctcctaagctatatcagctttttttaatccacaggagatgccgattttctgcgtttgcaacagccaaatgagttttgtcctatgcacaagacaagttgtaatttatcaaatccactcatactcttttcccttgctttttacccagacaaagaatgcagcagagaggttattaaattcttttctaggggtgaaatatataaaaaagctgtgtgagtcagtaatgcactccaagaatttaagtaaatttgttatgcttgatctcactgttatgaagccaaatttgccgctctttacaagataatacacaaaaatatatattcagcacacacagcccctaatattccctgctgctctcaacaataggagctgagcttcctgctttagctcatatttttctgaataagaggaaatgtatgaacaattttctgttccttcgtcttgtgcctggaatttcaaccacattcctagaaggcttttcagtggttcttccccatagttcagtgattctactgggctactgtatttattcacatttaatggtacagaaagtcccacttttagatacaatgcacacttggaaactgtcttagaagtgacttgcatataaatgaaattgactgcatgtatgataattctgcctttgcttatctggttatcaaagaaataaatgtttatagaacatttgtttatggagcccctaatatgttccaagctctgtacaggacacttcactacattagttcatgtaattctcacagtagccttgcaagatagatattatctcagtttatagatgataagacagtgtcaagagatattatatttcctgctcaagatcagacattgccaaatgtcccctgggggacaaaactgcccctcagtgagaaccactgaccttgaccataggagtgtgaaagtagctgtacctaaacacatccactttcaagtcttctttgagcctcataatgtcgagttcagccctttgccgtcagtggcaggccggccccatcttaatgtgaatgtgcaaaggtcagcagatatgccatgtcaggtaggaaacagaattttgtgttagtgcattcccacactgctataaagacatacctgagactgggtaacttacgatgaaaagaggtttaattggctcatggttctgtaggctatacaggtttctgcttctggggaggccttaggaaatttacatagtagaaggggaaggggaagaaagcacatcttcacatggccaacaggagagagagagtgggggcggggcagtgctacacacttttaaacaagcagatctcaagatctcatgagaactctatcatgagactgcaatagggggatggtgcttaaccattagaaactacccccgtgatccaatcacctccaaccagcctccacctctaacatattggggattacaattcaacatgagatttgagtggggatacagagccgaaccatatcaactttgaaatgtcattttgcttccactgtccctgagctttctctgctgggagctgtaggccgtggttataggtgacacaactctggccctgcaccttgttgtacaaagtcaaggcactgggtgatcggtagactgcacattaggattcctcttggaagccattactctgtcaggacagctagcaataactttgttatatatggaagtgactgccaaccatgtaaatatatccacctaacttcaaattatattcccaactcaatttacctttaactgtatctccaaaatgctcatggccatcccagtgccaccagatatgaaagaaggtatgatggaggagaagtcaaagaagaaatactggtcctgaccaattgagattaaaatatttgacttttgaaaatttcacaataacaaagtgactgtggagaaatattactaggtccctccaggaatgtggaagtagcctgtgtaggtgaagggttgtgaagcttaaattttgttagcttcacagtaaagacaccttattaggcagcctttgcttactcttctccctgcctctcattatcttgtttgatataaaagagtatttgtgaataagcaagggtgacaggttatttcttggcttttgacctaggatccctggtagtgtgaaacatgtaggcttagtctaagacctagacccctttttagatttgcatatttgtcaaaggtgaaagaataaatttctcaaaatttgtcagtcttgagttgagggatagcaaggacacatgagcatctgtcaagattgtcactgtattggccccagaggtatgctgtggggggattcaagatgtatacagccaaatacagagggaaagaatggaaagtgccctaaaatcttttggtggaaggtctgccctgataagaaccttggaactaatcgcccctatgacaatttgctggtttcccatggccagagccagccttctggaggccagcactgagaacacagaaaaagagggctcaggcagcaggtcagcaagagaccagcttatgagtgaccaagatggacagcttcttctcagctccaccagagttgggccaattaaaaagatgatcacagcactgccgccctcaggtgtgcgactcagtggagttgaggtgctgcaactcaatggaatgggttgggaaaaatagaagatagagaaggaagacagagctggttgggaaaaatgcaaggaaagtacagaaaggaatgacattgttataatttcaaaatcagactgggaaagagttaaccattccagatttatttatttatttatttatttatttatatttatttatttatgagatggtgtcttgctctgacgcctaggctggagtgcagtggtgcaatcttgctcactgcagcttccacctcccctcgcgggttcaagtgattctcctgcctcagcctccggagtagccaggactacaggcatacgccaccacacccagctaatttttatttatttttattttttattttttgtatttttactagagacagggtttcaccgtgttggtcaggctgatcttgaactcctgatctcaaatgatccgcctgcctcggactcccaaagtgctgggattacaggcgtgagccactgagcctggcccccagatttaatttgaaaaatcacattggaatatgaaaactgaacggatcatattattttacctactccagggccgtttggaggctcagagccagaaattaaagtcagctctagatattaagaaagctacatttattttattttattttattttatttttttcgtattgaagcctggtatttttgaagtatttattatatctgttaaatcaggatcaagctactgttgcaccacagaaatctcttaattagttcccttagactgtattccctgggctgagtttctcctgggagactgggaggctggaggggtcaggaggagtgatgttgaaatgctgggacagttggcttaaggagagcaaatgtggtgctctcttcagtaaacagcgccagacgactgaattttgtgacctggtaccaggagtactgctgcaagcattgatgtgacatcttcacccaatcctgagtagtacctagagcagatgcatctccccttcatcgttactcatcttaagccctgccttggagtaaagataaagatggggcatgatttgaagtctctagggagagacttggagtctcttgctctgccttaggagtgggagctgccctcttgggactaaagcgaagactgcctgggtcaaagtcatcatttctaagcagaaaatgggccttttacactgtgatttatgttcttcacaattcaatataacacagcatcttctgcagcttctatgagagtgtttttgaaaatttcgtccacttgcacctcatgaaaaatgcaagtaggtagcacacagagccctcagtgctaaggagcataggtctcgcccctagaaaagccatatttttttcggcagtgcctagacagaccagttgcatctgtttttgatgggaagcaaggatgacttctcttagaagtcgtgagggaggaaatgggaatctctcagtgggctctggttcttacagaaaggagaaatgtgtgttcagaaatagggagaatgatcaaacacatgatgttttgtttaggagtctatgtagctcttaccttgcaaccagaacttctgatccagaaacacatcttctattctgcctactacctggagatcagagcccaaaggaaggtgggaggaatgattttatttctttgaatgaatatgctttctaatatccttttgcctggtggctcttaggtagtcttgcaagcagccagtgggagtgatacagagtttggaagcattgcactctatgaggataaaatgtaacagagacaggaagccctttccctctgctagaaacagggtgcagcagctgatgtcctagtatttggctactgagagggatgagtagcattcatattttacaagtgaatcttgagacagtggcatggaaaaaaatcatgtgggtgggccttgtgcctgccaaagctttgcatgtagaagacaggctggcagccccagaggaagtggctgagagcatcaatgtggtgtcggggagcagctaagatcagggaataaagagacttaaggctgattcccggctctgccctctcttgcttaaggagctgaggccaataaccatacctcttttgcctcagtttcccgatctgtgtatttcatccatccaaccagtatttattgagcctctgctctgtaccaggcctctgtgtcagagacactgagtaaagagatcttggcttcaagttacataccatctgatgggtcagacaagacagcctctaagacctttctagtcagatgctatttgctcgatcctgaggtttagaaaccctactgtgagtttcctataggatctcttccatacgaatctcctctctctctaagcgcttagcagaagttgtgcttatctcccacgcctcattcttcatcctcctgaagccccatccccaccccctccccttatcagatgctcaggggtctcagcttttcccgtctcccagttaacaggtttcccgtcatgacattgccgagtctgtgtgggcagatgggacaaaagaattcaggctgagttatctgttattgatttgcatgtttacacatttaatctgctattcctttcaggtaacatttgcctattaacagcaatttccagcacattgatccaaacattgatctccagaaagatttgatagtgcttgaaaactcattgattacagaggagaaataaaggaaagggaagtgtcagagactaacactaaggatttgagtctgagtgattaaagaagaatggcagtattagcagatagggggattggagtttgagaatgtagtttgtgtgtgtgtgtgtgtgtgtgtgtgtgtgtgtgtgtgtgtgtgtttttgttttttgagatggagtctcattctgtcaaccagcctgtagtgcagtggcgcgatctcagctcactgcaacctctgcctctcaggttcaagcaattctgcctcagcctcccgagtaggtgggattacaggtgcccaccaccacacccagctaatttttgtatttttagtacagacagggtttcaccatcttggccaggctggtcttgaactcctgacctcgtgattcacccgtcttggcctcccaaagtgctgagattacaggagtgagccactatgcccggccgtagtttttttaaaacataatttttattaatcaaataatttgtggaaatattatcctgagtaaaatataaaaacattagtcattattggctacctcccgataaactcaattcccttcttagaggtaaagacattgttttgagaagtagttttatagacctttctctatacacttaagaacttagaacagtgcccccagtgtagtaagctgtatacaaattagcaattgttatttttcactgctgcttggattccacagtagggatctaccatagtttatttatacattaccctctatgaatatgctactgggggagagtttcattttctcctattgtaaacaatcctctaatgaatgtccttgtgtctgcttgtttacacatgtacaagtgtttctctacggtaaatggggcattttggtatttactgtctggtatttacttgatggctatattgccatttagatatgttgccttcaaagcggcagtggccacccacacagggaactagtgtttgtgagaagagaatgaacgttgtttggaatatgttggtgtgaattgtcagcagagcacctcttcttgaagacccagttggagagaaggtaggttagagttttaagactggagatgtggattatagtggcgactctgtaaactctcttagaaagtggggacagcggggaagttgggtaatccaagcaaaacattgcatgattggttgagggagggcaaaactcctattattatgtataaggatatgggataaaagctctcagttaggatgaccaaacatcctgttttactgagactgagggagctctcaggacatgggactgtcaatgctaaaactggatagtaagtcccgggcagatgcagatgagttggccaccttactgtgtggaggctcaatttcaaaaaggagggacgctatttcctctaaaacgatagcaaaggagacccaaagtagatgagttccaagcagttagaaaatgcacaggtactggagggagcaaggctcagcttctatgctagggaaagtttctgatgcacaggatcagggctcaaggtctagtaccatgtggtggtttggttataaccaacagaaaatggttctggctgactttgtgggagggaatgttgaaagcctattagagagtcacagaaggaggaaaagctggagagatacccttgcaacactgtaggttagggagaagaagcccagctaccgttttgtgtcagggacaccccagtcaaaacagtggcacacagacgacctggaattgccaacactttcagttcagttcagggaggaagcagccaactggcccagcccaatacctgaccaggagggggtgggcaacctgacagcagcccctcatgatgaatccaagaagtaagggggctccttggaaaaaattggggtgttgtgaggaagcagacattggtaccaatcaaaaaggttaacaaagtcccactatcaatccctaaagactggcactgacttcctacacactccacatgcctcgtgtttattcatgtctaggtatatgtctgcgcatatattatgtgcatagcaggtgctcaatacaatcttgctggatatataaacgaatggatactcctacagaggaaaacacactccagttagcagcaaggaagatcagttcctgttcccttgcaaaccaggagcaaccacagcccacgcaaagccacaatctctgtcttcacaccagggcaggtctcaccagagggcatataaaatgtcctgaacatgctgatataaatctgcctcatagatgtgagtcactttatataactgacatcttcctaagcagttgttcttaagcttatttttaggaaagataaaatttcagattcggtaggagagcttactgttcataggaatagcatacagcaaatctttttctttgttgtatatgacttcttttataaatctaggttatctttatagattagatatttttaaaagcagaataaacccactgttggccggcgtggggccggcgttagtttatttcaaaaaacccattaacttcttagacccaatttcatatacacacagcaccactgattgctgacaaagtgtttctgagtggaggtcctggaggaccactttggaaactctctgaatccccttggtaattggttttatccatctttattctgacaattagtgcgctgaagtccttaaaatcagtatgttcttgtaattcccttaaataggatttaggcaatctatttgacttcaggaacccttttcttgcagggaatgcaaaagcatgaactttattctcaattcagagaacagatcaacaaaatttaggtgtaatttcaaacagcaatctgcatgggctcttcactttccaggcacagggctggagacacagcctgagtgcgcatgaagtctagtctcctctggccagtaattaattcgcttctcttttatgtttggggatttggtcctgttcctcctcaagaaaattttgcatttccttatgtacagttggactatctagtgattctagcctgcgttcctcttgatgacacatattgactttcaccatttctccattaagtaggatttgtgtcatttcagcatttgtgttagcttttgtttcttgttattagggattatgcatgaaagcaggaagaagtctcagtactaagattctgggcctgtctggacatttccagtgcttagagttgaatgctataatatatctaaaggtgctttaaaaaaccaacaggccgggtgcggtggcttacacctataatcccagcattttgggaggccgaggagggtggatcgtgaggtcaagagatccagaccatcctggccaacatggtgaaaccctgtctctactaagaatacaaaaattagctgggtgtggtggtgtgcgcctgtaatcccagctactcgggaggctgaggcaggagaatcacttgaacccgggaggtggagtttacagtgagccgagatcatgccactgcactccagcctgggcgaaagaacgagactccaactcaaaaaacaaacaaacaaacaaacaataaaaggtgagattattgcatgggattgccaaggaaaaatatctcccactttggggcacaggtccaacataaacctttgtcaatacacttctggtggttggatttgaggtgtctcattacccacttataagttgctggccaaggtgcctacgaagtcatcacaattctccattcaggctggtttctgcctgtcatatgtcaccccttaagctacaggggccaggcctatttagcagaaagaggtttcattaccagtaacactgctgacgcttgagctcagaggtagcaagttcctcgccctgatgctgctgctgttcccaccagagcccttgtcaaacatcatatgacattcttgatgaacccaaatatgggctcgcaaacttcaactataggatgctccactgattatggatgggcttatgaattgaaacctaattaaaatcctggtgaagatcatgggggcttaggaaaaggcttccaacatctggcagaagacagggtctgatgaccttggacatttctttgaattctaaggactatgattccatactaggtggggagcaacatcactgttagtcctcccttatattaaaagggaacatatatatttatgtgtaatacatagcatgctttgccttaacgtgacatttttttgcagcttgtctcagtgaagctacatagggctcagggagaccttgcccaggtaggcttgtaggtgcttattctagaaacccatctgctactaactgcagctgtcactcagagtgaactcactggctgatcaaagccctcctctttctgagcataaaatgaaatctgaaaagcaaagccatgttgctgacacctcttgggcaaagccttttatagggggaagtgtcaatgtttgtaggtcccatttttatgtcctgctccagtcctggcaaccccgctggctgctgtcagcagccaagaggcaccaagggtgtggaaaatcaaagctctctcttgccaccagagagttaaaccccaaaaggcctgtactgaatgattacttggaatgctgaaagggtttttttattctctttcaggtcagctttgctgatatccaggggctaagtataactgtaagcatgaacatttcaataaatatgtttccttcaattacccagctggacagtttagttcaccagaccctgcaagcatacaaaagctgctggggaattgttgtgatttagataatttctaatctcctctttgcttaacctgcaggggccatgggcagtctcagagaccagggggaagagagagggaggtggggagagcttgttctcatcaacctgagatgtaggtccttggctcagcttcagggaccgatgctgcattcacaccaagaggctgaaaaatattgtgcaaggtgaaggtacgttggtggggggctggtaagggatgagaggtggggtggagaatgtggagcagtcacagggaagacgagacagagctgctgcctagcttgggtgctaggaagcgaaggaccatcaatggggactcagattttagtctctgatattacacctcacacccattcggcaaatttcagagggattgttgctggttcatagagatcaccattttgatgtgttacttgaaatgaaatttggtagcccacttgccatgacaatattacctgtgatgtctgcttggctaagctcattaaataggcagtagatttatacttaaattacttgatcaggggactaatgactagggggatggcttcttggtcatcatggaaaaattgcaaaggacagtggagaatcagatcgaattagaacaattgtttgggggttgagtgagcctctgtggcctgcgatgctctccatgggtgcacgtgtcctgggctatcagaattctagatttgtggatataatggcagcatttaactctcctctttcactaatgttttctgggtgtctgacatctgtttctgctctaaagggtcctctgattccccttgaagcactgtttcctccttgtgtgatacagtcttatggaaatgtcctcatggtccagttatcccatgacccagtcttggccagctaggtgattcctacacgtgacatggctcctggcatggccggtgttccagggcaccccagtggtcaggtcctagccagaatatgggacaagtgtggtgcccaggtaccttcttctagatctgttttggttcctagcctggctcagcaatctctcttcaatgctatacaaccctgagatcccttatgcttaacttagttggaattgaatttcttgttggcaggagcctgtgtttttttattgaagtttttattaattccagggcagggactttagagatcacagaatccttcatgtggttgcttttgtctttatttttaacagaagaagaaattgaagagatctgtggactggccaggcatagtggctcatgcctgtaatcctaacattttgggaggccgaggtgggcagattgcttgagcccaagagtttaagagaagcctggaaaacatggtgaaaccctttctctacaaaaaatacaaaaaaagaaaaatagcttggtgtagcatgcacttgtggtttcagctactcaggaggctgaagtagaaggatggcttgagcctgggaggtaaaggttgcagcaagctaagattgtaccactgcactccagcctgggcaaaagagcaagaccctatctcaaaaaaaaaaaaaaaaaaaaaaaaaaaaaaaaaaaaaaagaggccaggcatggtggctcacgcctgtaatcccagaacttcaggaggccgtggcaggcggatcacctgagattaggagttcgagaccagcctgtgccaacatggtgaagccccatgtatactaaaaaaagaaaagaaatagaaaaattagctgggcatgttggcgggtgcctgtaatcccagctactcaggaggctgaggcaggagaattgcttgaacccaggaggcggaggttgcagtgagctgggattgtgccattgcactccagcctgggtgacaagagtgaaactctgtcaaaaaaaaagaaagaagaaagaaaagaaagaaagaaagaaaagaaaagaaagaaagagaaagaaagaaagaaaggccgggtgcagtggctcacacctgtaatcccaggactttgggaagctgaggagggtggatcacgaggtcaggagatcgagaccatcctggctaacacggtgaaaccctgtctctactaaaaatacaaaaaattagccaggcgtggtggcgggtgcctgtagtcccagctactcgggaggctgaggcaggagaacagcgtgaacccgggaggtggaggttgcagtgagctgagactgcaccactgcacaacagcctgggtgacagagtgagactctgtctcaaaaaaagaaaaaagaagaaagaaagaaagaggaaagaaagaaagaagaaagaaaggaaaaatgaaaaggaggtacatgggtcaaactgcccaagtttctatgacttgacttgaactcaggacttccttagtccactgctctcctacaacccacagcttcctcagtttgagcatcctggcaactgtctggccagtcaggtttgtgacaggagcagtgagagggtccatgggatagcactcaacaagtctctcctcctgcagtgtgggttggctggtgtgtgtgtgcacagaagagggtggagggagttggcagcactttggggagagcagggaacacttcagaaaacaccttcatttgcccttttgcttggtcagagggcccatgtctaaatagaagtttcccataataagggtacattaatataaatgggaaataaataagcaatagccacaacattcacatttcagaatcaccttggaagaaagtcctcaggatccccaaggagctgtggagggaagtggagctggagtcagccctagagatgttcttgctccctctgccttataatctgaattcaacaagtcccccaccccctccccaccccaaaactctgcagcttctctctctgacactcatttcgggctcttggcaggaacctgccctctgacactcaccagggcccttcctcgcatgaatggccacactaacgagggtgacatttccacttccttctgttgtctttgtcttcctgcaacatcttgggactgatctcctgggatacctaattaaaaggccgacagtgcttttaccaatagtcatacttggagctgggaattgtatctctgtgaaataacaaagagcatctttggatttgtcctagaggcctgtgttccatgtagtccacatccatcagacggcaatgtagtccacatccatcagacggcaggcgttgagtaccagagaggcataccatgtctataatctgaggacatcctgcattgcgacacaaggtaattttaatgataaccctgactgcattcatttgtccaatgattaattcactaaccatgaactgccttctgcatgttaagtactaggttaggagatgaagatacatggatgagcaagagggcaggctcttgctctcaaggtgttcagtatgtttgagacttgagcaacatctatttctccttatctgatacttacaccttactctcttcccgagggaccctctcgtcccattttctatccacagagatttgaaggaaagaactgattctatttcctggcttaagggctcggcagatgagccaggtctagccattagagtacagttccacaaattgtacctttttcctacccataatgactggttcagagagggaacacgacccatctcagtcccagaaagagtcagtcctggatctattccatcatttgctctgctctattccatcatttttgctagagctcttggaactgagttttttccttctaccagtgtttctaagaggcaggaggaaagcctagagattctggggctatccttcttgctgttcgagaagagactgcttgagaatgaagccacaatagaggataacagatttcttaatgcatcatataagtacctagatccaatcataccaaatctacccatgaatgtttcaattactaataaattatcttttttttccttaggccaattagatgtgggtttttgtcttttgaaacaaaaacagttcttactagagtaaaacgggagcaagatgagtcgatcacttattataacacatcgtgataatagatgtgtgcagaagtgccttggaatctgtagctggggaagtggggccacacccaacctgagagatttggagaaggaatcccaagatgaggaattacttgggctaatcataaagaatgagtgggaattgtccaggtacattccaggaagaaggaagaacctagataaaaataaactaaaatttatttagcacacttttttctgtttttttttttgagacagagtctcgctgtgtcactcaggctggagtgcaatggcatgaccttggctcattgcaagctctgtctcctgggttcaagtgattctcctacctcggcctcccgagtagctgggactacaggtgcacaccaccacgcccagctattttttttttttgtatcgtttagtagagatggggtttcaccaggttggtctcaaactcctaacctcaaatgatccacccacctcggactcccaaagtgctgggatttcaggcgtgagccactgcacccggccttaacacactatttttaaagaaaagggcattacatttcagaaagatttggatctcagatgacttacttaaaaacactttggtgtttaaaaggcgaaacttctattttatgagaagttaataaatatggggcagcttattcctttatgatgctctgtaaccgctgctgtattggtgaactaatgatttccatacacacccttctcattctttaagcattccagaaaggaaacatgccctcagaagagagtgggatctatggctgtgattcacaaacctggatgttcaccagaatcacttaggggagtggaaacacaggcgcacagacccccaactctgacggaggcatctagtgttttattcaaatttctcagatgattttgctgtgtagccagctttaacattcactgaatctaaagagaggagaaaaataacataatgatagaaagcaccaatatttggaagttaagcatatctgggactctattccatcatttattagccacactgcagtttcatcacctcacctgtaaaacagaaataatcacattcacatattaatgacattcacaaataattgtgtagtgcttcttaggtaccagatgccatctaatggatttgggatatatcagtgaacaaaggggtgaagacctctgtccagtagagacagactgtgaaaataattaaaagagtaagtattgtgtgtgctggaaggccatagtgccaaggaacaaaggaaaagcgtagtccaagagagaccaagagtgcaagggaaagtaagagagcaggtcgtaatattacatagggctaatcagggtgagcctcattgggaatgtaatttgagtaaggacttgaaggaagagagggaattagctaaattattatcttgggcaagagcattactggtagagggatagaatactgggtttcagagaatggagtcagggaggaatctaagtttttggacagtgagattgaaaggatgtagctactatacattaaaattaggaattggtttgtgaatagagcaggttttgagaggaagatcagcagttcagtttaggacatgttaaatttgagatgtctattaaatatccaagtgggaatggtgacgatgtgttggctatatggatttggagttcagacgagaagtcttggctggagatataaattcagaattaactatagaagtgtttctaaagcattgaaatgctaagaacccaataaggcagtgggaacagatagagaagaaaggaggataacatactgagttctggaactttctgatatggaaagaataggaagaagataaagaatcagctaagactgaaactgaggtatcctagtagctaagtaaaggagtgttttaaggaagaagaatgatacggggtgtcaaacactacagatggggcaagttaagatgagggctgagaattgacccttggagtgaagattactgttgtccttgaccaaagaaactttgggggtaggatctgttggtgaaagtgtgagtcttcatcatatgattgttgtgaggattatgttgtactagttttaatgttgtgtaaattattatcataagtggtgtttaggaataaatcttaatcttcctttttgatcttgaaatgcatttccacctcttctttctcaactgaaagtattgcccaatgttacaatactgaacataaatccagggattctgatcgggattgtgttgaatctacagatcaagtttggaacaatggagtcctccaatccatgaacatggaatatctctctgtttatttgatctttttttttttaatcagaattttgtagtttctgcgtataaatcctgaacacaattttgtcagatttacatgtaaatatttcctttttcagtgctattgtaaatcctatggtgatttttaatttcaaattttagttgttagttgctgttatatatgaatgcaatgtacttttatataataacatttcatcctatgatcttactatatatactgcattactagttccaggagaattttgtcgattctttgagatttttcacatagacagtcatctaatctgtgaacaaggacagttttatttcttctttcccaatctgtctacattttatgtccttttcttgtccttttacactatgacttccagtatgatgttaaataggagtggtgaaagaggacatccttgctttgtatttagtcttaggggagaaacattcagtttttcaacatgaagtaagatagctgtaagtttcttttgtagatgttctttgagaaattgagaaagttttcttcattgctagtttgctaagagatttagattagtttagttttgttttaacatgaataggtgctgaattttgtcaaaagcttttctgaatccattgatattattatatgattttgttctcctttagcttgttgatgtgatgaattgtattgattgctttttacaaatgttgttccagcattgcatacctgcaagaaatcccacttggttgtgatgtataattctttttatgtggttggatggatttgctaatatttttgaggatttttgcatccattgtcatgagagaaatttgtctaatttttcctttcttataatgtccttatcttgctttggtattagggtaattctagcttcatagaatgagttagggagtgttccttctgcttctacttcctggaacagattgtggataattgatgtcaattcctttttaagtgtttggaagaattaaacagtaaaatcattcagacatgatactttctgtattgaaaagttattaattattgattctatttctttaataaatacggacctatttggagtatatatttttttcttttcttttcttttcttttcttttcttttgaaatggagtcttgctctgtcacccaggctggagtgtagtggcacggtcttggctcactgcaacttccacctcccgggttcaagcaatgctctgcctcagcctcccgagtagctgggattacaagcgcccatcaccacgcctggctaatttttgtattttcagtagagacaggtttcaccatcttggccagaatggtctcaaactgctgaccttgtgatccaccctcctcggcctcccagagtgctgggattaaaggcatgagccactatgcctggcctagagtatatatttcttcttgagtgatgtttgatactttgtatctccctaggatttggtctatttcattgaagttatcaaatttgttggcatagtattgttcatagtatttcttaattatattgttaatgtccttggggtctgtggtgataatccctctttcatttctgatactggtaatttgtatcccctttctgtttttcttggttagcctagctaacagttgatcaattttattgatcttttcaaagaaccagattttggttttgttgattttctgtattgttttctttttaaaattttgtggatttaggctctaatttttattatttgtattattctacttgcttgaggtttaatttgctcttctttctctagtgcctaaagtagaagtttaggttctcaagtttagatttttctatttttcaactgtatgtatttaatgctataaattttcctcaaaatgctgtttttactttatcccacaaattttgaagcagtatttttatttagttcaaatatctaaattttttttagacttcttttatctatgggttatttagaaacatgtttaatttccaaatatttaagaatttcccaactatttgtattaatgattgatttattatttaaagttggttattgatatcttgtttaattctattgtcctctgagaacatactttgtatgatttgtgttcttttaaaatcatgaaggtatgtttaatggcccagaatgtgaactatcttggtgaatattacatcaggacttgagaagaatatgtactgtgctgttgttggatgaagtattctgtaagtatcaattagatcaagtgaattaatagtgttattcaagttacctatattctttctgatttctatctgctagatctttcatttcaataaacattttaaatgtcaatgttttaaatacatcaattaaaagacatataggattagagtggatttttgaggccaaaactgatacaatgtaaatgaaagagaggtgttgagatcttcaactacaatattagatttgtgtatttgttcttttagctctatcagttttggcctcaaaaattttgagacaaaaattttgatactccatttttaggtcaatatacatttaggattattacatctttgtaacaaattggtccctttataattaagtaatgctcctttttatcacccataatcttctttgagctgaagtcttgtttgtctgaaattaacataaatgtgccagctttctttggattagtattagcatggtatatctttctccattcatttacttttaacctatctgtatctttatatttaaagtgtttttcttatgttttcatccactctaatcatatttgtctttcaactgatgtatttagaacattcacatttaaaatgcgtattgatatagcagaattaatatctactgaactaaattcaccttcaaataacactatgccactcaacatgtggtttggctaccttatagcagagtattcccaattccttctgtccttccctatggtattgctgccattcagttcacttctgcatatttatagttacccaatacatttaatatcattactttaaaaatcttttagattaattaaaaataagaaaaacgtaacattttattttaccttcacttatttcttctccaatgctttctttttcaatgtagatctagatgctttctaaattttctctttgactttggttttctgaagtttgaccataatatgcctaagtgtagattttttacttatcttgcttggtgtcctctgagcttcctggatgttttgtttggtgcaagtcgttaagtttgaaaaattgtcaggcattattacttcaaatattttttctgctctgttctttctttttttttttttttttagtcggagtctctctctgctgcctaggctggagttcattggcgcgatctcagctcactgcaacctccaccttccaggttcaagcgattcttctgcctcagcctcctgagtagctgggattacaggcatgccccaccatgcccagctgattttttttgtatttttaataaagccgggtttctccatctcaaactcccgacctcaggtgagccgcccacctcggcctcccaaagtgctgggattacaggcgtgagtcactgagcctggcctattttaacatttaaattgcatgtatgtttccttctcaactctgtccttttgaggaccattttctctgtgctcctttctgcaaaccttcacatataaagaagaaactttttcacacagttcagtttgctacccagagaaatctagaaacctgtgggttatttttggctccactttcggcagttaaaagacatagagagagaaatagagaagaggacaaaagaggaggagaaaaagagaaagactaactcttatacatataatttaatgtctgtgaatccaagaaagagattctagtattcaccctttccagttttcattaatctgatgcttgagagagagtacctgttcactctgtgatatcaaaatttcctggtatcccccagactctctgggactgaaggcaggagagaggagggagggaaggtgccatggtttgaatccttcctctacccctttagctgtctgaccttgggcaagtaactaaacttctctgagactcagaattctcattggtaaaataattaaacttatttttataaggatgaagtaaaattatttatgtaaaacacatgatcctgtggtgggcacatgttaagacctattattattattcattattattagttgatattatcattccaggtttgatattatcattccagtcttgtacagtagttcctggtgaatgggtttctgcaaaagtcacctatttcatacaaatatgagcccatggaaacctcttttatccccttgatttactaacttgtttatatttttccccctttaattttttgttattttttattttatttatttactttttttgagacagagtttcactcttgtcaccctgggtggagtgcagtggcacgatctgggctcattgtcgtctccgcctcccaggttcaagcgattctcctgcttcagccccccgagcagctgggattacaggcgcatgccaccacacctggctaatttttgtatttttagtagagatggggtttcaccatgttggtcagctagtctcgaactcctggcctgaagtgatccacttgcctcagcctcccaaattgctgggattacaggcatgagccaccgttcccagccttccccctttaattttttaatcctccaataaatgaggatttttcagattgattactgtattagtttgctagggctgctgtaacaaagtaacacaaactcaatggcttcaatgacagaaatgtattttcccatagttctggaagctggaagtccaagaccaaggtgtcagcagagttggtccttctgagggctgtgaaggagaaacctcttctatgcctctctcctcgtcttctatgtcttttcacctagtgtctttcctctctgcatatcattgggtaaaacttgtatcttttgaaaagaacatgagtcatattggattggggtccactctaatgacctcactttaaaatttagtacctctgtaaagaccctgtctccaaataagatcacattaacagatgggggaggtttgaacttcaaaatatgaattttggtagggaagacacagttcaatctataataattggcttgtcaataacttctctcttctgctagttttgtcctatcttgctctttgtcagtgctctctagtttgagaaatttccaaattctttgtgaggctcagtcacctgctccacacacctttcctttttttagaagtttggctcaatttagtctctgttcttggactgtcgttactttttctgactctttcttgatccattgaggggaaattctgtcactagttggctgttctcgtgctcttgctgcatttgtctttgtttttgaacaaattccaaaaataatcctttgtaacctgtaatttttatctctacattgtcttttgttttgcttcacattgctggaaccatgacagaaaattctcagagtaatttcgattagcatatattcatggcaggcctataaaggttattttattcttaggcagatgcatctgtaattttgcgtctctcagtacacatggcttccagcctcagagcagaaaccacttttggacatgacatggaactcatgtatgaaatgggctttggaatgctatatattttcatgcttagaaattttgtttgatttatttcaattcaacaaatatttattgagcacctactatgcatcaaatcctggacataaaataattcataacatgtggatgctgatcttcagaagcccttgatctagtagaaaagacagatcttgatacagtgtggcaagtgatactcatgataagcataaaacgctgtgcaagctgctaagttttggattttatttcatttttgagagtatcttagagcttatacatttttttttcttgaggtttttcttgaagtttttttcatggctgttggtccagatgaatgatggtatgacctgacttcatggctttccagtgctcttggggtatatttaaaatcttcagagttggctattggggcctgcgtgacctgaccctgcccacctcccctgcctgagctggagtcacactgctcccaggacaatgttttcctgcaacactagtggcctttcggttggtgaaggctttatattttgtcccttttcaagatctaagcatagggttctgccagtgatatgtttgttcgtatcatttgggcaacaacttttcttcctctggccttcataataaaagccacttctccaaaaggggttttgccaggatcccctctctgtatctcagtcaattcctctgtgttactcttttcctgtgcctttccttcatcacacttacaatggtttatatctacttatttgtgagattagttcttttatgtctattacttccactggattataagatctatggggtaggaaattcacctcttttgctcatcattctatgcccagcatagtgtctgactcaaaatgagatctgttaaaatttccatctttaatcttttacgtctatcctcatgttctctccttacacactgattaaagggtcccagctagaacttgcatccatgtgctctggctccaaatctcctgccttgtgctgtagtctcattctgggatcatctgatttacttgtatggctagagactcacttctgaaaattgttgtatggatgtagcttccagaatgagatcctgtgctgacatttatgttttctttatttctttttgaaaaaaatatgctacattgagataaaggggacaaagttatgtgaaattaaatgaactctttgtaagcattattcctacaatttgagtaggtataaataagcaaatggtagtgcctgtatgggatgacctgggtcccagtcagaaaataggctttatctcatgccaattccagaatgttattggtagctgcctagagtgttacattgaagattttgtttaaagttctgtcttgccgcacaatgaaaaaaaaatggcatggttgattagcagtatctattttgggaatagggaggagaggcagcacacacacagaccttatcctattgccctaggcctcagagatgggttaactcactagagtaacaaaattggaaactctactctgtattttcagtatatgctgaatgatgggttttccattgttctttttaatgtatacataatttacaaacagtgaaatctacactttttaggatagcattctgagagttttgacaacacacacagttgtgtaaccaccatcatgcagtcaagattacagaagagttttgttatcctcccaaattcccccttacccttttgtagtcagctcctcccttcacctcaagcccttggtgacactaatttgctttctatctttatagttttgcttttgcaagaatgttatataaatttaattaatgtctgtagccttttgagacagtcttctttcatttagcataatgcatttgagagtcatccacattgttgcatgtgaacaggttttaattcaaggttagttaagagatcaatcaatgaaatagatattcatttactaatttaaaaatatttattgaacttattgaaattatgaccattaatatgcttggtcataatttcaataagttcaataaacacaaataaatatccataagcatggtctttttccattccaaatatctatctatctatctatctatctatctatctatctatctatctatctatcatctatctatctttatatgtacatctcaaggtaagttaccataaaacaaattctaaatgactgcttagaggcagtaagttctgaaggagtttggaggagggagaggtctttgtttacaactgggggtgtttttataaaagtagatggcatttgagtgagccttggagagtagttaggacatccctttagaaatgttgaatatcactaacaaagtatttaaatattcttgttttgcttctcaggagtccattaggcctttttcacttgcagtccaaccttatagccatgcacaagcacgaaaaaggatattctggagagtgagagatttttaaaatcattttttactataatgaacatttactaaccatatactactcgtaaaagtcagtgcaaagtgttctggagaatacaaaggtaaaaaagacgttgttttacttctttatctgtcacttatttatactacacttttctttactctatcctcattcccgcccccctttcttctatcttgttttataaaggatttgaaccagcttccaaaagtactcataaaataaatcattaaaaatatttggacaaagagataatatgagaaaaaaaacccaaaacaatccaggggtaaatttacttaccccccaggaatgtataccagattattttatagagatactagagattgggctgtatattttctggaggctaaagtaagtagggaaatgtgtttggttaaaaaacccatattgtccagaagaaaaagacaacccacttgtttaaggttttcatcttgctgagctgagaaaagatttctcccttgggtcttcataaagaaaccactttttgattcagagaatatcttcctggcttccatcccagcaataaatacaagaagagcaaagtttgcttggttgcttcgtgcagcatccctcaatgcaagtcaatattggaacagcaaagctccattatgtcaagtaaatctgacaacagtcagagtgatgccatccagatacacagctctcagatggtgtgctctgatcctagggcaaaatttatcatttctagaaaatagataaatagcatgtccttcagacaatcctccataaatatctattctcataaatggggttttgataggatttggacaacagagacttatctgacacgtaactagaatacatctattcagtgtttccattaagggctgatacacatattttgacaaccgatcagacagaaggtaggatattattgttaattgaaaatcgtgaagactatataaggtgtgtttgaataggggttattcctccttggtgcaaggtgttcttattctagaagaaggtgctgtgctgagacctttagatatattctgtcatttgaacatcccatagcatccctttattgtggcttctattttcatccccattttacagaaaagctaacattttgaggagttcagtgatttgttcaacttacaagcttgtaagtcttagagccaggattcaaaatcaggtctctctggaatcagaaatctgcaaatctttgtttgcttaaaaatatttaaacatacaaaatttaaggtattatgcattgaacactcatgctcccgttgcccagcttatggtataaagcattaagaataaagttgacaccctcgtagattcttccctgatctcattatcttcttgattctctcctcctagagatagcccctattcttgaaattgataccactctcatgaatgtctttataattacatatcattatgtgtagccccaaacagtattgtttcgtgtatttcaaagcactaatttataccaaattgtatggatctttctttaacttattttttgtttaactgtatatacttattttattttattttatttttgagatggtcttgttctgtcacccaggctggagtgcagtggtacagtctcagctcactgcagtctcaatctcctgggctaaagtcatcctcccacctcaaccttcccagtaggtgggactacaggtgcatgccaccatgcctggctaatttttgtaattttttgtagagatagggttttgccatgttttcttggctggtctcaaacccctgggctcaagcggtccaccagtctccgcctcccaaagtgctgggatcacagatgcgatccactgtgcccaacctatactttagttttatccatcttcatagatgtagttcatatccattcattgtcactgctggatagcattccattgtaagacttgcaattattcttctcttgatggttacttgagtcatttttaatattttgctgttaatgaaaatcccattctgaacattcttgtccatatctcctggtggatatgtttaagagtttctccaggttagtgggatattttagaattgtgggtgaaattttttttttttttttttgagatagagtatccctctgtcacccaggctggagtgcagtggcatgatctcggctcactgtagcctttgcctcccgggttcaagcgattcttctacctcagcctcctgagtagttgggactacagatgtgcaccaccgtgtccagctaatttttatatttttagtagagacagggtttcaccatgttggccacgctggtctcgaactcctgacctcaagcgatccacctgcatcagcctcccaaagtgctgggattataggtgtgagccaccgggcccagctgggttgaaacttgtttgtcacaataattgggaggcactactggcatttagcggctgaggtcaagagaagctagatgtactgcagtgtatgatacattcttataaacaggaatgtgtcctgacatcttgtgactttgaagtattttgccagatattcaggtgtaaaatttgtaattatttgaatctataaaataaatttattttacataaaaccacaaaatactctacataggtttagtccacatgagctttccaagaatgtagctgacatgtaatttttaaaaaatgcactttcagaactttaccaagtattcactattctggaaaatcacatcatcaacagcagttctactggtgtacttgaattactcattcaacacgcttgttgaagtttgccttagcaatggatgcattaaggtcatactacacaaaggtgggtgtgttctagttaagttacctaagcatttcccattgactagaagaaaatgtttgcaaatcatataactcacaaaggattgatacccagaatatataaagaactcttacaactctgtaaaaacagaaaaacccaagcaacattctttaaaaatgagcaaacgatttgaagagacatttctccaaagaagatatataaaagtccagtaagtgcatgaaaagatgtgcaacatcactaatcattagggaaatgcaaatcaaaactcaaatgagataccacttcaacccattaaggtggctactacccaaaaagcaggaagtaaagtggtgaggatatgaagaaattaaaacacttttgctctgggaattgtaattgcaattgggtaagtaaaatggtgcaactgccgtggaaaacagtatggtggttcctcaaaaaatcaaacatagattcaggatcatcatggcagatgagaggcaggactagattgctgctctgacttggatggacagagcagcatgtggaggctcgtatcatgaattttagctccagaacgactgcaggaaaaatcaggaatcccgagaggaccttctgaaaggacagaccctctgaaggatgggaactgcttctgcaggacccaggagataccccaaatactccacagcaagacccacccaaggaaagtctgagctcagacatgcccagtcctgcccccacctgatggtccttccctacccactcaggtagctgaagacaaagggcatatactcttggaagttctaggacccacccactgcctgttcctctccatactaccatagctgatgctctctggaaagtgccacctcctggcaggaggccaaccaacataaaaatagagcattaaaccaccagagctaagaactgtcacagaatccatgtcaccccctgccacctccactggaagaggtgctggtatccacaagtgagagactcatagactgttcacatcacaggactgtgcaaataaccgccagtaccagcccagagcctggtagacttgctgggtggctacaccagaagagagataacaacctctacagctcagctctcaagaagccacacacataggaaaagggggagagttctatatcaagggaataccccatggaacaaaagaatctgaacaacagcctttagccctagaccttccccctgacagagcctacccaaatgagaaggaaccagaaaaccaactctagtaatacgagagaacaaggccccccctccaaaaaatcacactagctcaccagcaatggatccaaaccaagaagaaatccctgatttacctgaaaaagaattcaggaggctagttattaagctaatcagggaggcaccagagaaagacaaagcccagtgcaaggaaattcaataaacaatacaagaagtgagcggagaaatattcaaggaaatagaaagcataaagaaaaaacaatcaaaacttcaggaaacattggacacacttacagaaatgcaaaatgctatggaaagtctcagcaatagaattgaacaagtagaagaaagaaattcagaactcaaagacaaggtctttgaattaacctaatccaacaaaaacaaagaaaaaaggataagaaaatatgaacaaagactccaagaagtctgggattgtgttaaacaaccaaacctaagaataatttatgttcatgaagaagaagagaaatccaaaagtttggaaaacatatttgggggaataattgaggaaaacttccctggccttgctaatgacctagaaatccaaatactagaagcacaaagaacacctaggaaattcattgcaaaaagatcatcacctaggcacattgttatcaggttatctaaagttaatacaaaggaaataatcttaagagctgtgagacaaaagcatgagataacctataaagaaaatcctatcagattaacagcagaaaccctacaaggcaaaagggatcaaggccctatcttcagcctcctcaaataaaacaattatcagctaagaattttgtatttagcaaaactaaacatcatatacaaaggaaaggtacagtctttttcagacaaacaaatgctgagataatttgccactaccaagccaccactacaagaactgctaaaaggagctctaaatcttgaaacaaatcctggaaacacatcaaaacagaacctctttaaggcataaatttcacagaacttataaaacaaaaatacaatttaaaaagcaaaaacaaaaaactaagttatacagacaacaaatagcctgaagaatggaatgatatctcacatcttaatactaacattgaatgtaaatggcctaaacactccacttaaaagacacagaaatgcagaatggataagaattcaccaaccaaatatctgctgccttcaagagactcacctaacacataaggattcacataaacttaaagtaaagggatggaaaaaggcatttcatgcaaatggacaccgaaagtgagcaggggtagttattcttatatcagaaaaatcaaactttaaagtaacagcagttaaaaaagaaaaagagggacattatatagtggtaaaaggccttgtccaacaggaaaatatcacaatcctaaacatatatgcacctgacactggagctcccaaatttataaaacaatttctaatagacctaagaaatgagatagacagcaacacaataatagtgggggacttcaatactccactgacagcactagacaggtcatcaagacagaaaatcaacaaagaaacaatggatttaaattatatgttgggacaaatggacctaacagatacaacagaacattccattcaacaaccgcagaatatacattctattcaaccacgcatgaaactttctccaagatagaccatatgataggccacaaaacaaggctgaataaatttaagaaaattgaaattatatcaagcatcctctcagaccatagtggaataaaactggaaatcaactccaaaaggaaccttcaaaaccacgcaaaatacatggaaattaaataacctgttcctgaatgatcattgggccaaaaatgaaatcaagatggaaattaaagaattctttgaactgaacaacagtagtgacacctattaaaacccccgggatagggcaaaggcggtgctaggaggaaagttcatagccctaaacacctacatcaaaaagaccaaaaaagcacaaactgtcaatctatggtcacacctcaaggaaccagagaaacaagaatgaactaaacaaaacccaagcagaagaaaggaaatagccaagatcagagcagaactaaatgaaaatgaaacaacaacaacaaaaatacaaaggtaaatgaaacaaaacctggttctttgaaaagataaataaaattgatagaccattagcaagattaaccaagaaaagaagagagaaaatccaaaaaacctcaataagaaacaaaacgggagatattacaactgacaccactgaaatacaaaagatcattcaaggctactatgaacatctttatgcacataaacttgaaaacctagaagagatggataaattcctggaaaaacacaaccctcctagcttaaatcaggaagaattagataccctgaacagaccaataacgagcacagagattgaaaaggtaattttaaaattaccaacaaaaaagtccaggaccagacagatttaccagcagaattctaccagacattcaaagaattgaataaaataatacatttttaaaaataaaaagaaatataatattttattataatctatttccttaaaaatacagctaggtaccaatcctattgacactattccacaagatagagaaagaggaaacataacccaaaaagaaaactatagactgatatccctgattagcgtagatgctaaaatccttaacaaagtactagctaatcgaattcaacaacatatcaaaaagataatccaccatgatcaagtaggtttcatatcaggaaggaaactctgacacattctacagcatgaaagaaccttgaagacattatgataagtaaaataaacaagtctagagaggatagatattgcataattccatttatgtgaagtacctagagtggtcaaattcatagggaccgaaaatacaacagcagttgccaggggctggagagaaggagcatggggagttattgtttaatgtgtacagaattttagttggggaagatgaaaaagttctggagatggatgggtggtaatggctacacaacaacgtgaatgtacttaatgctgctgaagtgtatgcttaaaaatggttaaaacggtacatgttgggccaggcgcggtggctcacgcctgtaatcccagcactttgggaagccaagggggtcggatcacgaggtcaggagatccagaccatcctggctaacatagtgaaaccccgtctctactaaaaatacaaaaaaattagcctggcgtggtggtgggctcctgtagtcccagctacttgggaggctgaggcaggagaatggcatgaacccgggaggcagagcttgcagtgagccaagatcacaccactgcactccagcctgggcgacagagcaagactccatctcaaaaagaaaaaaaaaaaaaaaggtacatgttatattaccagtggtattaccaggtatattttatcacaataaaatcagatattttaaaaaataaaaagaaatataatattttagtataatccatttccttttaaaaatacagttaggtaccatattaacttttttatgacttagaaatatctttaattgaaaaattaagtcatcttgtagaattacctttcctttttcatgggcttaatgcccctcaaaagagaatgtttttattaccaagggaaagtgtagttttcttatattgtatgaagtactcaatctttgttcacaatttagtttgctttgtaacagatccttgattctccagtttatgttgactttttgaaatcatgtgtgtgggtaagttgtgttatttgtgaatttcatttaaagaaggtaaagagagtgttaccaactgtttattaccaaaagaggacattgggcttgatagggttgtgaactagtgctccagggtagatgcttgggaacggaatttctgattgtagagcatgcccatctgaaaatttgctagaaaatgtcaaattattttccatagcaattaaaaaaatcatgccaccaacagtgttttagaggtcctattttttgttccatctcctcaccaatacttggtatcatcacactttgaaattcctgctgatctatgtatatgatgtcaggtaggttatgatgcagtatggatgtcccacccaaatctcatgtttaaatataatccccagtgttggagctgaggcctggtaggaggtttttgggtcatgggggtggatccctaatggcttggtgctgtccttgtgatagtgaatgagttgtgtagagtgttctctctaatgtaaagtgtaacacctcctcccacaccctgtttcttgctcctgctttcaccacatgatgtgccttcacctgctttgccttctgccgtgagtaaaactccctgaggcctccccagaagccaagcagatgccagtgccgtgctttcatagcctgcagaaccatgagtcatttaaagctgttttctttataaattacccggtctcaggtatttctttaaagcattataagaatggtctaacacaggttccaattttattttttaactaggaataatcaattgatccagccccattcattgaatagtttatccttcattaattcaaaatctgtgactgtatgaaatccatgactatgcatataaatacacatatacacacattttttacatggggattttttgggtttttttcttttttaattgtcatataataattgtacataattacagagtacacagtgatgttttgctacatataatgtacagagatcagatcaaggtcatcttgagtatttatcatctctttgtgttgggaacattcaatatcctccttctagcaatgtgaaactgtattatatgttatttgttaactatagtcaccctacagttctatagaacactagaactaattcctcttatctagctgtaattctgtatacatggatttgtttctgggttttctattctgttccattgttctatttgggtattcaattaaaatatcaatatattttaatatattctatgaaaatagcagtctttcttaattactatagatttataattagtatttatgaaagtctgcattttttcactattaaaatatactgcttccaaaagcagttcaatacttagcaaagcagctttatggtgagccctctaggataaatgcaaataatccatactgttgtcttctcttacaagatacacatcatttaactaatgattaaataaatcattatttaaattttaaatatagatgttggaggcaatctaaataagtgaaagtgcatctgtcaaagatgatgacagaaatggatgtcaagcttttatttttaggtctgtcaatgatgagattaccaaattgtccattgagaccacttctagattataacaagatcaatgcgcacagaagtactcttaactttatgctttcattggtgggcagacatgtgtcaacttctctatttgtatagataaaaatgacagagaaagacacacatcccagtttctaatattcgaaatcactatctgttctcttcagaacccatttctcttaaactcagtggatgaggttcactcactcatcgtgttcctttgatgtcactgttctagtaagagtcacatctactcagctatatcaattgttttttgggaagataaattataaaaaggatctgcttccctcagcctgatatatcctctgggccacaacattataaacagaacagaaggacaagacctatttgctttacctattgactatgtgcagggcacaccttgagaatgacaacagaccacgcacctaagaagacaatgtcaactgtaatttctggggtatatacatgttgagacgaatataatcaaacttctcagtaaatgaaatcagtacaagatgacttctgttatactaacagacaagcctaaaaatacactcccacctgatctgaaaaggatttcagttgttagaagcagtcgtatcccttttcccaagaaagttgagagccagagaaaaaattagacgtaaactagcaacattagagcaaggctatagaagaagaaggtttggatgtgcagtaaggatggacatgaccaacatggagcttctcaagtgggtggctttgaatgtaccacattcatattgagcaggggctagccaagaaaacactaacaaatgactaaggattctgtgtctccacttctctcacaagacatctgagcccagttttagccaaatagataacccttcttcctatgaagtcagatagggaatggagatggtgaccaaatgcttattctttcttatgtgattcctgcaagtggaagtaaggagagatgctggtgatgactaccctctgggtcaccaatgatgagttaatttgccataattggtgcaattattataggcccatgatgctttaccagagaggtgatcttgtttgaaggcaaagagaatgttcatttgacccttgaagagtaaattaattttctctatagcaagctttacacatatggagagcttcgcaatcacaataatatgcagtggtctgaaggtttgtgatctccccagattcatacattaaaacctaatccccaatatgataacgataagatgggacctttgggaggtgattaggtcataagggctaatccctcatgaatggaattggaggtaccctgatgaaagagacctcagacacccagttagccccttccaccacatgcggatgcagcgaaaaggtaccatttctgaaccagagagtgaacctgtacccaacactcaatctgctggcaccttgatcttggactccccagcctccagaactgtgagtgatacatttttgttgtttgtaagctactcagtttatggtattttcattacaataacccaaacagactaaaacactcttcaaaagggactatatatctggactatggggcacttggaatatgttatatttaataaaaatgtagtaaatgaatgaattcataaacaagtaaacacctgcctctccatcaccttgcttctttggactcaccccttaatgctgtcttcttttacaagatatcacactttaaaagaaaatttaaaaaatacctagtgaggagaataaaagaaaatttaaaatatacctagcgaggagaatctcatggtgtaatttccgggattttatcaagtagtccatagacattttggcagtttcccaggaaatattaataagaaaaaacttttttatttgtgagaaacatgtatttcacaaaagggaaatgtgtgattttttattttttcttagaagcactgtgactttttaaacattacaaccttgaaggctgcatgggccccacaaggagtgcactcatccgtctgtctcaactaacacatcattcagggagtgaagttatcttgccactataacttcatggtatttgggattattgatattcaccacatttccctttctgtggtcatattatgtgatgttgtatctcaaatacacaaaaatggattcatgactcatattcattgaggtgtaagaatagtatgaagagacttccaggatgaaaagcctagaaatggtcactgtcatccttaaaataagaaaaagctgaacaaatggaaaatcaatgacttttcttgacaacatcaaagaactgagatcacagggtaaactgccaaacctgggcaaacctgaaactggaacattgagtacatctggggaggtacagtaactgggacctgtttatctggaacagaagcctgcagtcataaccctgtaggaatgtttacatggtaaattcaagaaactgctggagggctactgtgagagtgagaaactcctggggcctccacactgttatgagctttccctttagaaaccccaccaggtttctcatggtgaaaatttcactcagataccctcagggccctggcagtgggagggaaggattagctatggtcaaatatacagagcatcctctcaataaccaaggcccattccccaggggaaagggctttgcctactcacagttctggaaactttctccaactgtgggaaaaagaattctcccccactccagtcccctaaggggaaaataatcaacatgcgatagggctccaaggaaaatattttaaaaacacagtatgaagaaacaaagtgatcattagaaccaggctcagatatgcacacactttgggattatcagatagggaattttcttttaatcctataattggaaactttaagaaaaagaaatcaaaggaaatgctagaaattaaaaacattgtaataaaaatgatgggctcatcagtagacttgacacaacagaggaacttttcagtgagcatgaaggtaggtcaacagaacttccaaactgaaaggtaaagagaaaaaagaatttaaaatacccaacaagcaaacagaatattcaaaaactcagggacaatataaaaaatggtctgcgtataatttaaattctagaaagagaagggagcagaggaaatatttgagaagtaataatgaccaaaaactttcaaatccaaaatttatacgaaaccaaaaacagcctgaatagctgaagcaattctaagcaaaaagaacaaagctggagccatcacactacccagcttcaaactatactataaatctacagtaaccaaaacagcatggtactggtataaaaatagacacatagaccaatgaaacagaacagaaaactcagaaataaagtcatacacctacgaccatctgatctttgacaaggctgacaaaaataaacaatggagaaatgattcaataaatggtgctgggataactggctagtcatatgcagaagattgaaactggaccccttccttataccatatacaaaaattaactcaaaatggagcaaaaatttaaatgtaagacctcaaactataaatatcctagaagacaacctaggatttactcttcttgatgatggccttggcaaagaatttttggccaagtccccaaaagcaattgcaacaaaaacaaaaatagacaagtgggaccaaattaaactaaagaacttctgtacagcaagagaaactaccaacagagtaaatagacatctacagaatgggagaagctattcaccaactatgcatctgacaaaggcctattatccagaatctatagggaacttatgcaattcaacaagcaaaaaccaaataaccccattaaaaactgggcaaatgacatgggcttctctcttgaagacatacaagtggccaacacacatatgaaaaaatgctcaacatcactgatcatcagagaaatgcaaatcaaaaccacaatgagatagcatctcatactagtcagaatggctattattaaaaagtcaaaaaacaacagatgctagtgaggctgcagagaaaagggaacacttctacactgttggtgggaatataaattagttcacccactgtggaaaacagtttggagatttctcaaataacttgaagcagagttaccacttgacccagcaacaccgttcctgagtatatacccaaaggaaaggaaatcattcaaccaaaaagacacagacacttgtatgttcattgcagcactattcacaacagcaaagtcatggaatcaacccagttgccatcagtggtagattggataaagaaaatgtggtacatactcaccatggaatactatgcagccataaaaatgaatgaaatcacgtcctttgcagcatcatggatgcatttggaggccgtaatcctagttaagttagcccaggaacaggaaaccaaatactgcatattgccacttaaaagcgggagctaaacattagacacacatggacatagacatgggaacaataaacactacaggctactagagtggggacagaagagtgaggtgcaggttgaaagacaacttattgggtactatgcttactatcagggtaatgggatccataccccaaatctcagcatcatgcaatacaaccatgtaacaattctgcacatgtaccccctgtgtctaaaataaaagttaaaattttctaaaaaagaaaaatatcttacctatagagagactaggatgaaaattacagcagagtttttcatcagaaaccatgcaagctagaaaagagtgtatggaaatctttaacaggttgtttaaaaacgacaaaaaccaggcaaccctggcaccccatctttctagaattctatagtcagtgaaattatccttctaaagtgaaggaaaaacaaagactttctcagacaaacaaaaactgaagggaattcattactaacagatttgtgctgtaagaaatgtcaaaatgttttcacaaagaagaaaaacgatgcggataaaaaacttgtatctatgcaaagaaacaaaaaaaattgcagagaaagaataaagataaaataaaatatcttttttattcttaattgatctaaaagataactttttacttagacaataatagtaataatatattgggtgattatagcttatggataagtgaaacgattggcaacaatgtcacaagaggcagcagggaggaattcggaatatttcattataagctaccggcactgcttgtgcagtacttaggtgctgaccaaataactttggaaatgaaagtccatttcaagatggatttagattatttaaaaacatacgttgtaaaattttagagcaactgctaaaaatttaaaagtaaatataaagaatgcattaagatagaagataaaaatgaaaccatacaaaatgcttaattgaaatcagaatggtcagaaaaagagaggtgacaagaaacaaacagcaaatataatgaatagaaaacagtaaaaacatggtagtcattcatccatttaaatctataataacttaaaatgtgcatggtttatgcagcaaaccaccatgacacacatttacctgtgtaacaaacccgtacatcctgcacatgtaccacaaaactgaaaaacatttttaaaaatgtgcatggcttaaatatgccaacaaaatacataccaataaaaatacagggattgtcacagttagttcaaagaaaaaagactaaatgatgtattatctataaaaatctactacaactatgaagactaggataagataaaaacaagtgattgaggaagctatactacaaatcaaacaaaaactagaataggtagttatattaattttagacaaaacagactttagaacaagaaagattatcagggaaagattactggggataagagagctcaattctccaagaggagagcaatcctaaatatctatgcctctgtaaacagaacatcaaaatacatgaggcaaaagtgatagaaccaaaagaagaaatagacaaatccactattacagttagagacttcaatgactttctcttagtaactgataaatgaagcaggcaggcagtcattgagaatacagatgactcaaacagtactatcaatcaacttgatctaaatgatatttataaaatgttccaacaaaaacccttaaaactcaataggaagaaaatgactcaaacatttttaaaaaaagatctgagcacacatacctcaccaaagaagtttgcagatagcaaataaacaaataaaaatatgctcaacatcatcagtcattatggaatcacaaattaaaaccacaagatatcactgtaagaatacccaccaggatggctaaaatccagaagacttgacagtgttaactgctgggaagcaattgcattcccaggtatttacccaagtgatttaaaaacttgtgtccacacaaaagcctgcacatgaatgtttatagtagctttattcataatcatggaagtaaccatgatgttcttcaatacatggttgaatgaattaactatagtacatacctatattgtgatatttttcaataataaaaagaaatgagttttcaagccttttgaaaacatggatgaatcttaaatgcatcttgctagtgaaaggtgtaagggctctgtggctatggatgacattctggaaaaggcatcatatatatgataccacatggtgtatatatatgatatttatatatgatattatatatatatatataaaatctccaagaagatatatatatatgagagagatatatatataaagagagactagaatgagaagagtccatatatatatgatatatatatatgatatatataactgccagaagatgggaagatgctctcccaacagtgcagcaagctagcagcagcgctgggctcctcagtctccaaggctaagtctcacagccatgcagtgcctgggttcaaatacatttcattaaatgttccattacactaaaatgaccatattgtaatggaacaggcttggtatttttttaagtacaaaatcaatgtgctgaccttagttattattatatcaatataataacattagtcttctttaaaaaaagaaaaatatcatgtgaaatatcaccactcacatacaatttccacaaattgtctttgtttttgtgcttttccctcaggcttgtatatttttacagagtggtaaccagccttttcacttaatgttataacataagagtttccccaagttgcatttagttttatcacttaaagattttttataagcagctaagtattatcttatctgcattcattgtattttaaatgaataatcacttactattggataaagttgttactgttttgcattatggcaatattcatacttttggcttcttgatttttaaaaaattatttatttaccttctatagcattactgagttaaaagatatgaacatctttataacttttttttttttttgagatggagtttcgctcttgttgcccaggctggagtgcaatggtgtgatctcagcttactgcaatctctgcctccagggttcaaacgattctcctgcctcagcctcctgagtagctgggattacagccatgtgccaccacgcctggctaattttgtatttttagtagagacagggtttctccatgttggtcaggctagtctcgaactcctgacctcaggcgatctgccctcctcggcctcccaaagtgctgggattacaggtgtgagccaccgcccccggccatgacttgtttttttacttaaataaaaaacaatgttttttcaattaaatatagaagattggccacatgcgtgtatctgtcctttctgctgagatcccactaagatggaagaggaaaaagaacacaagacacgtttggaagccccaaggaaggtattgcactgagtggacaagccactgtttgagagactgcatgatgagcccctgagagtaggtagagagagagtgaggccagttgagccatgcttctcttctgtccccaccaagggccaagcacgtggtaaatctattgtgcagcctccagccctgaccagggctgctgaataccaccgaatgtgcccagtcagtatcacttggatcaaagggttcaccccacaaacctcaaatccctgactgtcaactcatgagatacaatgagatagttgttttaagccactaaattttgctgcacagtgatagataactaaaggagaagaagaaaatatacgagagcatagaaaagtaggaaaatgagaaaaagaagtgattatgaattccaggaaaagcagaacattcacaaagaaaaagaatgattacagaacactactcagccacttttgaatgtgccataatatacttaaccttccctgacatttaatgttttctgtatgtgtgtgtgtgtgtgcatgtgtgtgtgtgtgtattataaacaagtttcagtgactactcaggtacatgctgctgggatttaggcagacacctcaaaatatgccactttggcttttgaaaaaacagcagaagctggaagaccctcttaacttctcctcaccccttatcccttgaagcaggccatgaaacctagcccctttcctctaaagtagggcatgagaccctcattaacatccctatctctgaagacacaggaacacagaggagactccgaaccaacaagccttgcttatttcttccagtttattaccattagatcacaccccctttctccaatcatacttcctcctgactattcttcatcaaatctaagcaaaaaaaaaaaaaaaacgccattttccctgtgtatttgggtcttcatttatgaaggctgttgtgtctcataaaactttgatgaaataaatttgtatgcttttatcttggtaatctgtctttcattataggggcctcagctgtgaaccttgccatagcttgagaaaagatactttttctcccctatagggcaacttcctaggacagattcctgtggttgacttcttcctgggccagactgcttttctaggtcaggagggtattttttaaggttcttttctttttttttttttttttttttgagatggagtcttgccctgtcacctgggctggagtgcaggggcatgatctcggctcactgcaactctgcctcctgggttcaagcgattctcgtacttcagcctcctgagtagctgggattacaggcgcctgccaccatgcccagctaatttttatacttttagtagagatggggtttcaccatgttggccaggctggtctcagactcctgacctcaagtgatccacctgccttggcctcccaaagtgctgggattacaggcatgggccaccgtgcctggcctttttaaggttcttgatacattgtcaggttgtttttcaggagggccccctcagctcacactcctgcaggctgaagggctcgtgtcagttccttggaaaggcagttttcacacaagtgccctggcaccttcaaaatgctgtcatgcccctgtcctccccactttggatgtcgtggttctttctggccactgtatttttccagggcctttcattttcatcaactcagataacccacctcgcttcctccttcccaaaatgcattttcccggggatccaaacccagcccttaaattagctagctatatgattttgagcatatcacttaaatttaatggaacccagctccttcatttgcaaagggagacaacttactacattatctctaaagtccttttagttacagtttaaaaaaaaatattgaataatgggaaataacctaaatgttcaacaaatgttacatcaatatgatatatccagatgatggaatacaatgtagtaattttttaaaaatgtgtttttattacaaggcatgggaactaattcatgatatgatgctacatgaaatcagcatgatactgtatgaagcctaatttataaatacacattttgataaataaaattaaaaagaaatacactgcaagactagcagtggctcaccgtatgattgcattattggtgatatacagtcagaaaaatgcattttctacaattgtgaaaatcagacaccgcagtaggattagtgtaagcatcgtggtttctaggtagtcttctctgacacctaggcagaatcagggcccttcctcctggctcccaccagatgtaggacacgctttcattacagaaaacattactctgcattgcagttgcaagtcaacacatttgcttcctactacattctgagcccctgatggtgaagtccttgccttgtttgttgatgcatctgtatcatgacacctggcacttagaatactccagacacacattggctgaatgtttaatacctcggttggtgaaacaatttctgttggaactataattttaaatttgatgttgcctgctatttttcagtttctaagataaacaatatgagcacctcggataatattttcttctaaatgctttgtcaaaaactagagtaaattgccaccaagtgctgcctgtgagtatggactaaaaagttcctctgggagcaatgaaggcatctgacaacaatacctagtggcattagttgtttgtatatatattgatcgcccattgttgggattctttgctcaccatgcaactttcaagttgtaattgggcttcttgtggacatgtcaaaacagagcaaatgtgctaaccaggctacagggcatgagtagctggtccctctggcagttatgtttctcatggtaaattaatgacttggcaaatttttgtttgctcagcctttctgaactcaattaactttgcaacactgagaaaatcggatttggagatctgcaaagctgaggttgagattttggaccttggtgatccaaatggggaatgccacgcttcgaggcctgtctatatgctttatttttgtgacactgtctatttaccctcccccaatagtggagaatcagagtgctccttgtcagtgttgctacagagaagatatacaggatggaaggacagctcctcgtaggacctagacacaactgaagagctttggaaaaaccttcaggttttggcacagagaagtattgacatacttagaagaagaccagtttaaattgtgcaatgattcattgaacagtcattccttggtatataccagggattggttccaggacgtctgagtataccaaaatacgtgcatactccagtcctgtggttggccctgtagaacccgcctatgtaaaaagtcaaatctgtgtatacacagccttagcatcccaggaatactgtatttttgatccttgcataaatggaacatcacagttcaaatacatattgttcaagggtcaactgtagctacacactagtgcaaaaggtactaagttgtacctagccatttgtatttcttatattcctactctctaaattgcattttgtttgtatctgtaaccaatctaattaatattcatgtttagttagtttaaatacatcttactgtttttgtagaaaaagcctgactagttagtaaaagcatgccactacttttgttaacggttcaccatttcttccatccctcctctcatagttgaaggggttcccccctctgccacagtaatgtctggctggtattattatgtctgcttttttttttttttttttgagatggagtctcgctctgtagcccaggctgcagtgcatggcccgatctcagctcgctgcaagctccacctcccgggttcacgccattctcccgcctcagcctcctgagtagctgggactacaggcgcctgccaccatgcccggctaatttttttgtattttttagtaggacggcgtttcatcgtgttagccaggatgatctcgatctcctgacctcatgatccgcccacctcggcctcccaaagtgctgggattacaggtatgagccaccacgcctggccttatgtctgctttttaaatttgtctcttcccttagctgctcttcaatccacttgatcctcaagcctctcttggcctctgtgtagcctcctctggcactctgggtagaactagaccaagagatatcttttcaaaaagcagatagaatcatgttgcctcatgcactaaaaatctctctttgctctctgtgggtataagaaaaagtctaaatgcccaagctggtacaaaagacctcacaatttgccaccacgtcccactacatagctcatgttctggtcacactgagatgctcagattcctcaaatgtggcttcccacctcatcatacttcggtgtctttatacccctattacttctgcctggaatgctttccctggcttctttggaaatttcatttacatcattcaaaaccaagatgatccatcatgtcagcaagtgtggtttcttgctccctccttggtgttttcacaatcctttaaacagatctattctctagcaattaccccggtattataaatatctgtttgcacgtgttcgtttctttctagactgtgaacttcttgagagcagagagctgtcattcatctctgtagagccagtgcttaacacagtgtttgactcatcatagatccttaattcatgtttattgaatttattaattaagccataaccgaggcatcaccatccatttaattgcaaatgaagtcccacggatgaaattaacagcctcatttctatcagcccttgcagataaagtgatgacaaacactgagcgtttcacacagtgccagccaatatagagcaaagaaaaccatccaagggcattggccttgcccttgaggagcttacaatatagtgggaaagatagaattttcattcaccaaacaaactgaggacaaagtgaagaacatttaaaagctatgttagttgtaggaggcatgtgaaatgtctaaggtttgaggtcggaaaaaatgtgagcagatcctttccctcacatgccaccatctctctcagcagtgtggttgaaaggcagagtcacttggaatccagtgtggaagcaggtggggggattgtgattagcatcttcagactgttttctatatgaagttggatcaaggctactattgaggaaaatgtggtttgggattggcaatggagaaggttgggagaaaggcattctagaaagatgaaataatgtagggaaatgctagatattggggttcagaagtctgcctaatctgaatcaaatccttaggcaccacaattgtttgaaggactccatagtgctgcgcagccagagagcagcaatacaaataattctgttcttttcttttgctttaccatttactcaatgtttatgcacctctgaaattgtcatttgctcctcgcagcaattctatttggtggactgaatcttccttgacctcatcatcctctgccccaccatagatgaaggcagaaatcctcctagagaggatgctcgccaaacatgccaaaggcttcctgagcttccctttgacatggcacatttgcatgctactgtgtttattggtttattcctgggaaagtagatgtcttttcttatttcttcccagcacctgatacaaatagaagctcaataaatgtttgctgcatgagtgattaaatgcatgggtgcaatataatatatggcaatcttacttgccattcttacttgttgtctctatcaaatgtctcattcttcacctgagttcacaggctactcaacaagtccccagcagtgaatcccaagattatgacccatctcagaatccccagcccaccaaatactgaatggtcagggtggcccaccacaaatcagccagacccacccttcctccaggcttagagttactaaagactggataataaagataacagtgccttgagcctggcatgtgtgcctgccggagcgcagaaacagacaggacccagcagccccagactctgctgataacaaaggctttctgagcaatggcccttcaaagcaacaaatcaagacagacagcctgccaaaatcatgccaacccagcagactgagaatcctttacccactgagaaacagccttcccagcggatccatcacttagacaactcaaattagatggtgagaacatggaggaagcagagtctgcctttatggatataggaagactccttgattccttgagcaaccttgccccaagtaacccccactttccacctctcagtgagccagagaaataaacacctttatctgcctttcagatttctattgatccttcaagactgctcagatgccacctcctctgtgatgccttcactcagctctgaagagcacattgttaggtgaagagccaggtttgatggtgttctgggcaagggtctcagcactatccaaattctgatttccaatcaaacacctcttccctaaaagagatattcacaaggaaaagctatatggggaacaaataatccttttgcacccagcaccccattgtagagctctctgaaagagtaggattggattataaaatttagcttgaaacacaagctgggctttcatctcctcctaaagtcaaaatccaagttctggtgccttattatctgtctccatggcaatgataagtgcattcaggtgtgttggagggaggaaagactgttaggcctggcctgatgaggtgggctctgagttcactcaacaattctaccgtatgtgaaggttggtgtcttagcccatttttgttgctctaacaaaatatcacagactgagtaacttataagcaatagactggatgcggtggctcacgcctgtaatcccagcactttgggaggccaaggtgggcagatcacaaggtcaggagattgagaacatcttggccaacatggtgaaacactgtctctacaaaaaatacaaaaattagctgggtgtgatggcacgtgcctggaatcccaactactccggaggctgaggcacgataatcactgaacccaggaggaagagtttgcagtgaaccgagatcatgccactgcactccagcttgggctacacaacgagactctgtctcaaaaaaacaaaaacaaaacaaaacaaaacaagacaaaaacttataaacaatagaaatttatttctcatggttccagaggctgagaagtccgtgatcaaggcgccagcatgattggtgtctggttagggctgctctctgcttccaagacagcaccttgttgctgaagcctccagagggcaggaatgccatgtctcatatggcagaagagcagagagtaagagagagcaagagggaatggaacttacccttttataatggcaccaatcctacccatgagaatggagccctcatggggctctccatcctcatctcttaaaggtcccatctcttaatactgttacaatggcaattaaattttaacatgtgttttggagggacaaagattcaagtcatagcaggtgggctggagaggggagaaattgatgttttggctgactattgcttttccttttcaaatagagtgaccccactcatacataaatatggctcagttaatggcttggaatctggccaatcatatgagcaaagggaaggagggccacttacctttcaaatatgactttaacccttttaccaccaaccacacatctatagaatcagatttttaaggtgactcattcacattcaacttccatgttctgatttggaacccaagagaggagcttcatcttcaggcaccactaagcagtcccctgtaagcatcctcacaggtagtttatataaaagagtgtgaatgcttccttttttgaacaatcaaaaaatatctaaattcttcttttatggtgggcttctaggccatatgaaccagtccctgccatttcaggactgtgtcagaggaaatgcttaggatttgagaagcctgtggagtttctccaggatggagcacgggcactggcaggggagaaagggtcagaaagaagtgtagaaaaaacaaggagattatggagggagaaaagaagatggggctggggagaccagagagggcacagacccctgacattcttccagtagactctaaggaccaaaaggaggctgaatggacaagtacaagaatgtttggaccatctctagactctgtgggctcatggttaactgatggtgagattatttccttcctagtaatgctggcctcagttttgcctttcgtttttcttatgcaaagttgtctcacacagatggcatgtgaatgcatgatttagaataagtgacttagatgaagactctctccttaatggtcagaaaagctcaaaaaattatcagcctagaccaggggtggagatagcacagaaggaaacacaactacctgaacattgttggtgtagctgagaactctggtaccctagaaacactccccagctttcccaacctcagttgcagacccttgtttcatctctggcatttcagatctcacttgacctctagcatgattggtgtcctgaggtttggtcccaactgtcagctctatcacaagctctctcaagggcagggcattgctggagcaaacatggtatattcatactcctgatgtccttccaaggaaggacatgcatggcagactgttcactaataacaagtccctcttaggaaatgtgagccaatggcttccacaaatgtggaagcattaaattgccagtggtcaactttccactcctttcttcccctatcagagaaaactctgaagcactgatttaagacagaggcataatgatggtgcaaagtgtttacttggagaagagctccctcacgcaacaatggggcttgtaacatcagtgatacgtagatttttgttgggttaagccaccgagattttggtggtggttatgactacagcataacctaacttatgctgacttcaatactttgcaagcaggaaaaaagcatggttgtgaagagattttaatggcacgtgtattagtttcccaggccttctgtaacaaagtaccacaggctgggtggcttgaccaacgggaatttattgtctcatcattctagaggctggaagtctgagaccaaggtgtcagcagggttggtttcttctgaggctgagagggagaatctgtttcagggctctcacctcacttctggaggtttgctggcaatctttggtgtctcttggcttgtagaagcatcaccccaatctctgtcttcatcatcacatgctcttctttctacttgcatgtctgtatccaaaattccgtcttttattacgacatctttcatactgagttaggtgatcaccctatccacagatgacctcattttaactaattacttctgcaacagtcctatttctgaatgaagtcacattctgaggtactgggggttacaacttaaacaaatggataacatatgagttttctgaaaggacacaattcaagtcataacagtataagaacatgggaatatactatgatgttaggttcaaataacaggaaaaaagttgcacaatgaaaggaccctaaatatgagacacgaaatatatctgatgcatatattagtattagtatatattatgagatatttgtatataaataattagatattacataaaatatatattatataaaatatattatattgtataatttttaaataaggctactttttcaatgtcttactagttttttcacaatgaatatatgttattcttacagagaccaaagtgctgtttttaacaaattgttgcactctctctgtttctcttgctgtacccaccaggctgggtcacttgagaggctgccagctcttggaggtttgaattttgcctcttgtttttctcaggcagaattgtctcacacagacggtgcacgaatgaatgatgtaaaatgaatgacgtaaatgaagactcccctatcttaatggtctaggaagctcaaaaaattatcagcttagaccagggatggagaccatgtggaagaaaacacagacttctcaagagagccaaggacaaataaaaataatctggacacagggagtggatggatggagaagtccagagtaaagggctttccacgtatccctctcacatgggtgccttggaaaccttcttgcccaccacttactatctgtcctccaaggattcatcaagatcctacttcttccatgtagccttccttgactcattccgtcttcaagggtctccctcttcttccaacttctacagtacttagagtctagaccagtgggtttcctgtggggtcctggagtccacatcaccccccaccagaagtatttcatgagctatctcatctcagaggagggaggatgtacaaatgccccatcctgactttgaccagaacagctaaaacaatgtaacctaatttatgcacttcaatatacaaagaacaggttctgctgctataacaaaaattcttttgacaagctgcagtatcccgtcaggtactttcattctgaaggactgaagaccaaggttttgcattcactgaggtggcggggtcttctggcctcagtgagggagaggttaaccttgtctatctgcgattgggctgcctgggactgtcagccatgggttgccatagagacaatcatgagatactcaacaatcttggcaactgcaccagaagccctatcctcattcagcacaaagcaggcatgttgctgaagacatgcagcctgctcttttcctattcagagacctcagaaactgctgccctgaggatacatgtaaaaaaacttctagttactttcagtacattgttctgctcttttatcctcttctgggaaacaaaacaaagaaaaacaaagcaaaacaaagcaagaactctgttttggaaacataagtcagaggggacctgcagttggtgaactgcttagagaggcattgcccagacttcaggtccttgggttggacagggcctgtctccattctgagatattttttccttgtcagatggtcatttacccaaatccttctagtctcagaggctgacctctaactgctgtcagaatgctctttctaatgctaatgaaaccaaagataatatggcctaggcaaatgctaagcactctactttattctcactctatagatgtgaaaactgatgttcagaaagacaagttacatgccttagatcgtgcagctgttgactccgaagctgatgcactcagcccgtctgctattctgtctcctacagtaaattgaaaatagccttcactgtaacttctactcactggtcctcactcattctttgaagcagtgcagagtcaatccccttacatttcacagccctttcccttggacagaatgtggatgacatcttcagtgaactcagagtgccatgggccattgtgacgaatgacagtcaggaggcagccctgtgcctccccttgctctcccaactccaaactaaacttctctgggttcccttaaaatgtgtaagagttcctgctccttactctcaacaaacaagtgcacctatcttagcttctttccagaaaaaggcagaaaatccttaattgctgctcctccagccactcactccatcattaggccagcggagatgaaatacactttcttcactacaccattggcttatgcacagcctggtgcccaatgggtgaggaatgacctacaaggctgtacttggtcccctggtcccagaagtggtggcatcaacagtagcaacaacaggccatctgtcttcgagctgactttgagaagacaatttagtgacagatgagataccctattgggcatttttgcctaagtgtcaggcatgggttaaagtttctggaatctcacctctttttctgcactatgcccttgaagaacaaaatctatgattgtaggatgtggtatttaaggtgatgactgtgatctcctcatccaactggatcattttactggtgaggaaactgagatccagacagctgataccatgttttcagccagtggcagcaccaggaactaaattcatatctgtccaaatccaaagtccaccaccttaaccaccacaataaaagccacattggtctctagcatggatcagcatcctgactttgggaaacctgtcaaatggccatcatacaagtacctcacagagttgtctccatttatggagttgctgtcagtattaaatgggagataccatgttatgtgcctatcactgtgccaagcatggagtagattctcaaccaaaggtagccagtgctatcagcagggataaggatccatgtctctccgtaggccctttgcaccatcccacatctgcctccctggtgcttcttgtcacagccgggcatggtgatattatcttgggcacagcgtgatgcaatagcaaaagctcagccctcaatgagttggtaactcagtgagagacacaggaacaacacccatcttgtgcatcttcttagcaggattgaacccacggctgttggattccaccttgaaaccctttgctcttgtggtttctgagacaatgatgtctctccatttgctttcctacataaacacagactcctttctagtctcctttgctggctcttcattcttttccagaactttaaatattggtggtcctctgtgctcttccctcagatctccaaagagaacttttcctaggtgatcccatcggctcttgactttaggtaccaatctcacatggatagccctgaacatttttatcttcagctttgaccttttccctaaactccaagctccaatatccaagaatttatatgatttctacaatttgatgttttcttggctttttgaattgaacatttcccaaattaaactgtaattccttggctgggtgtggtagctcacgcctgtaatcccagcacctcgggaggctgaggtggatggatcaccagaggtctggagttcaagaccagcctggccaatgtggtgaaaccccgtctctactaaaaatacaaaaattagctgggcatggtggaggtgcctgtaatcccagctactcgggaggctgaggcaggagaatcacttgaacccgggaggtggaagctgcagtgagctgagacctcaccattgtactccaacctgggcaacaagagcaaaactccatctcaaaacaaaaaaccctgtaattcttccatcccaaattcatctctcccctgaacctattgcacttacctttattttgtgcaatttattcatccaatgcatatttattgagtgccatcattattccaagcattattttaggcagcagtgaactgtataaagaagacaaagtacaaagcccccttttttgtgaagtgtatagtttagtaggagaaccagaaaattccaattaactagataaataatttcagacagaaatacctgttcctccccactacatctcagtagatgacaccaccttttgctagttgttgagtccaaagtgcttgaagtcattcttgactcctgctttcttctcaccttctctgtgcaatccttcagcaagttctgccacctctatctccaaaatatacctggttggaatagagttgttagtggtgacggtattgagactggatgggatcaggaataattacagtgtatgccatatgctgtgtctggaaaaagaaaaactaacaaagatgaaaatgttttcctcctttcttcagagacacacagagagaaaggatcaatctccaaacacgctcccttttgttactagggtaattcacgttattgctaccccttggttttgtatttctccagacttcattctttgaggcggtggtgggggtcctctgattcctttatttgctgcagtggggtggcggtacctgtcttaccactggattctctccaaggcacatctcaagctggtcctgtgatgtctgactgaggcacaggtgcagggccatgcctttccatgccctcactcacctcactgggatatccatggtcccagcttctgagttggggtgttagaaaagtcttgcagtgttcaaaggaggactgtccatttggagtaagttatatggcaaccaaaaaatatatatattatatttttatataatatgtatgtgctaatcagggaacaccaggtatcacttctgcaagatggtcatcaaatgatctgttgggcactactggacatcaaaacggaggacagcaacagagcttctccatggtgcttgtacaaatgaacactgggtggtctgcggggcctcacgtggcttccatattgttcctgagtcccggcaatagtcaaagcttttctgtgacacaggtgaagctcagaggctcctcacactgtctccacaccttcccgtgtgccctctctaggtgctgtccagaacccacctttcctctttccttccttattcctcttctacacagtcttcattaaatcaatcactggagcccacattgctgcccttcctccagagacctgagatttttgatctcaaaagcaagactagaccatattgacattcttctgagacaaatacgtggaatagttaactgaatggtgaagttaagtctgagaaaaaaaaaataccccaaacagcagaatctctctaccaggtttgctttgtcactgaggaagcccaaaattatgaggaatggttacacctatataaatctaaaaccattggggttaataaagagtgtccatgtgcataatctcatttaatcttcatgctgatgctgtgacttagctacggttagtatacagataatagatgataaaagctgcactgagctggggcttaaatgcagctctcctgcctatgttcactgcattattcactcccaggtgaaaatcctggccttgatggctgtcagttccaaatgcccaaccattgttgggtttccctcaaatggcaacttaaggcaattttcctaaaagctaatgaagcttaagttttagagcacctgccttgcacagacccctagaatgctaggagtctctgtgagttgcagagcatcccaggattggtggatctgggcttccttcaaatggcaacttaaggcaatttctcccctttcccccacctggacactcatcatgggggtcatagctttactgccctcagtgcatcctgcctcttggttccatctcctggagataaaggagccctttgaagcctaggcaggaagatgggcctttagaaagtgctgggggcaggcggggcgcggtggctcacacctgcaatcccaacactttaagaggccgaggcgggtggatcacgaggtcaggagattgagaccatcctggctaacatggtgaaaccccatctgtactaaaaatacaaaaaattagccgggcatggtggcacgctcctgtagccccagctactcgggaggctgaggcaggagaatcgcttgaacccgggagatggaggttgcagtgagcagtgattgcgccagtgcattccagtctgggtgacagagtgagactccatctcaccaaaaaaaaaaaaaaaaaaaaaaggaaaaagaaaaaaaggggggtggctagggcaagagcaagccaacttacaggtgactttgacggggggtgcgagttagttttgtgttcgagctttgaggaagagaacaagcatgaggcattcaaagcatgagcaagacgaaggggatagtgctggagtttgttttgttttgtttttaattagacattttccaaggggctggagggaacctacactgcttctaatagaatctgaatctgatcttctggaagatgagaatttgatgtcatcttcggaagcctttaaggatgccattgacttccatccttcttagcacagctgagaagtgaagatgcttctgaaaaagctcattcttttcaaagcaggaatggcgaggcggggactctggagctgaccttctcagctgttggtgtagagaggccacttttcatttttcttaattgcagcgtggttgggtgtaggttcaggggtgggtagggggctgaagcttataagatttgcctgctttaagaaaaatattgtctaaaaaagtagatatttagagtgagaaaaatgtcaaaataaatgactggaaccttaggaattcagtcactatcttttataatctcttcagataatttgccaggaaaaaaagctgaattaagaacacttcctgattgcaacctcatgtttccactgatcctgggatgctctgcaaccctcagagactcccagcattctcagggtctgtgcaaggcaggtgctctgaaacttaagcttcattagctttaaggaaaatgtgttgcaggaggatgggaggtgaagggaggcattagagatggtgggtgccagtggattgcagggaagggagcctattggtgggattaattaccttccctcatcctgggagcatctttgagctatggggaggaagctatggtagtagctgctgctccacgactgatcacacattgaatgattggtcatctctgctcagtagtctgtggatccagcaacagcctgagctggctgaaggcaccttgcaagtccctggaaacctcttcattccagacttcaagtgttggccagggaaggctccaggttagagcagcttaagcttttcttgtgcatggatgggtccctttgggaatatagactgtttcttcatttttgcaataggaaaaaacttcctctattttttttttcaatatttctctcctaatgtttctgctttggctcagagagaatggagaaccctgcttcctttactcatcttgggcagggccaggtgaggggactttgtctctttgctgacttcactcaccagcttctcacaaaggcaagaggaattgctcatatgagtgtcctgcattctctgagtgtgtttagcaagtataacgacaggagccaagatcatttctttttatttctggtgctcaacaacgtgggtttcccccttcctgggggtccccaggagtcaagcacacctaagaccccacctggctttctgggctggctggccaggcactgaatgttcgttccagaatctccagctcacctgggagggttagggagatgggtcatccttgctcatgggacaagagcattaggtttgccccacagactcaggcattctattagaagaggaagtcctgctcagctctctgggctttgagactgcaccaaccagcccatgttattagagaaactctgctttaagaagcatcagatgctggctcagaggttctgattcacagctattcttttcttttctgtattgagtttcccatttgactatttttccttgactatctctccttcagttaagaacctggaaggaaggagaaatttgtgccagtattcgagtaccagaatgccatgtgcaccctaaacacaaataagtgcacacatgtaattttagggggatcacagatctctctaaggaaaccaaggagagccattagagtacttctcaaacatgaatgagcctataaatcagccagagatcttgctggaatgcagagcctgatgcaggtggtctgggctgggcctgagatctgcatttctaacaagctcagaggtttctattctaaggcgtctagatccttggtactcaaaggtggtctagggaccagaagggtcagcaccacctgagagcttcttagaaatgcagaatctgccaggtgcagtggctcaggcctgtaatcacagctactcagggaagtgaggtgggaggatggcttgaggccaggagtttgagaccagcctgggtaacatagtgagacctcttctcaaaaaaaaaaaaaaaaattagcccggcatggtggtgtgcatctgtaatcccagctactcaggaggctgaggcaggagttcaggagttcaggaattaaggaggctgaggcttgagcccaggagttcaaagttgcagtgagctatgattgcaccattccacttcaatttgggcagaagatcgaggccttgtctttttttttttttttttttgagacagagtcttgctctgtcacccaggctggagtgcagtggcacaatctcggctcactgcaagctccacctcccaggttcacaccattctcctgcctcagactcccaagtagctgggactacaggcacctgccaccctgcccggctaattttttatatttttagtagagatggggtttcaccgtgttagacaggatggtctcaatctcctgacctcgtgatctgcttgccttggcctcccaaagtgctgggattacaggcgtgagccaccatgcccagccggccttgtctcttaaaacaaaaacaaacccaagcagcagattctcaggccccatcccagacctatagaaacagaaattttggccaccactaggtagctggctaattgctttctcatttttttttcctatcagcaccttcagggttatattatgtaaacagttacagttgctctgggcaggacttggttaaatcaggggcttgtcaagtaggaaaatcactaatttccccaaggagcctcagagatgctgctggcagctggccctcctctgtgagtggttggaggctgtaaacgggaccttgtgcaatgtttgtggagggtaatgtggctgcattaatgatgatgcaggagcgttcacagaagtgattcttgactcttttaattgcaccatttctcaaccttaatgctccctccttgccatttctgaattatatatccacacacatccagacgcacacatatcgtagattaattctcccactcaaactgataaactacctaacacatcatttatactcatctgtctttgccctaatctagccaaactctttttctttgctctgtcagccacagtgctttgagaaaattagtctttagcctgcactcctgcatacactgttcacgtgagtcctttccaaagctacctaaggaaatcgggggctgatcaggtttcaagctctttcctgcattttgacctcatcctgatgacggctctttaatcaccaggatgggtcagtattttacgtactgaaagttgtattttgttccctctcaaacaaaataagtttccctcacattgtgtttttccacacctctcactaccactcccaccagcgcaaacaacttgtcctgacatttaaacgagatatgctgttttccacagtcagcacctctacttgtcttcccagcctgcctagtctcactctctccttgactcctgggtgacagattccaagagacaacagccatattgccttagccagagacagtgctctcctctctcgcctcctctggcacaagggaaaagacccacagttttgattctgccttggggtcctgcccattgctgctcctgctacctctctgagttcatagacttggagtcttgcttgtccaggctcatgaaaccctgcaggacatatcctagtccagctaatgtctgtgttcgtgtctctttgaacctggccctgcggtgctcctggagtctttcaggctccttgggttctcctgaaactcacctcttgcatttaaacagctgcctcagcacttgtcgacatctgcctgcctagctggatttccagtctctgtgctgctcctcccaggaagtcctgtcctaccctagttccgggcctggctcccgtcagaatccagatgtgagcttccttctttagttgagctaactccagggacttggtttgtctcttgtgacctccccaaatggagctaaatgaagctaagggacatgagcgatgcaaggatgcctcctcgtaaaaacccagtaagagtccaagaaacctactgtggcaaactggcaagctcccttaatttggaattgggggtatggatgtggggagagagttgggggcaatcttccctgcataaacagctcgctggaagacttaggagtcagcacaatgttccatattaaagttaaaaactagctgaactatagggccaagggcggttttagatttccgccccctcccgacctttttttttttttttttttttgagacagagtctggctcgcccaggctggagtgcagtggcatgacctcggctcactgcagcctccacctcccgggttcaagcaattctccctgcctcagcctcccgagtagctgagattacaggcacctgccaccacgcccagctaatttttgtatttttagtagagacagggtttcaccatcttggccaggttggtctcgagctcctgacctagtgatctgcccaccttggcctcccaaagtgctgggattacaggtgtgagccactatgcccggccccttattcatttttattgcacacaatcaaacatattaacttcctaaacttcttagtaactttccaaacaaattatgggagagaatcagctgttaggttgggactgtattagaggctatttctgttgtcaattttgtggacaaacaatttgtcctgtatagagactaaattcttgatcagctatttcaacactgcttgcaaaaccctcatctaattcttcatctccttgaccattggctctgctgggctcttgctctgaataaattgcactgccatatttctccactccttgcctgcagggtctttctagaaagagctatgagtcaattcctgtaggtcacccacagattcatacaattggatctcaatggggctttcactgatacttttcaaggcttcccttcaccacctgatgaggggctcactctccacaccccccaagcccctgacttcattcccactctcacattctctgctgataacctcaactcttgctttatgaagaagtcattgcaagtagggcagaggggaaagaaggaagaacaccaaagggaaaaagtcaagaaagaacagagtgagaaaatgagacaggctgagagggggtgctttggtagcaggcaggcagaggagaatgatcttcccatttcatggcatggaagaaggaagaaatgctcttctatgcgccagctgccttactcagtcccgaggggcttttgccagccccctgctagctccatctcctcccactgaccttgtgatctccctggccccaggttttggttgaaaatgaaagatacttacagcagaagcagacatctgcacgtaaaagatgactgcttcttcattagttttgtttgtgttttttttgttttgttttgttttttgttttttttttttttttagtttacaggaagagcaaatgatataaactgcagcaatgccagggaaggctgtgaggagttcctggcatctctcatgacacacagagtcaataattcaagatctgatttcagagttgaagaagctcaaggtgatagccaagccctccttccaaacaggaagaacaggtgcaagagtttgaggtgacaccagagagaactgtgtgcctggctgcgcataagattgtgggattatcaagaaaagttggaaagcgggagatgaaaaggctaaactcaaaggcttttctcaaggaaggatggtcttgtttgtgtcacagtgctctgggggcagaagagactcctggggactgaatacagatggcttctgaatttgtttacattttctatcagaactgacatttacttctggtcacacgatgtttttcttctatcacctttaccctcttttgtgttctcttttctgtcttttatcctttatcagtcaaagtccagccagaaaaacagaaaccatgctaaatatttcaaacacagggggactactagatagaacatgttacaaaagcactgggagggctgagagagccataacgaggagaggggaggaagatgagctaccacagagattggaaattccaggaagctgtgattttccctaggactgaaggaaccaaacaagggggttctagagcccagtagcacagtggtggctgaccctgctggaggctgcagctgctattcaaagaaatcactgctgcactgtagatagcaacaagaggccattggaagctgcagctacctgctgctgctgctgctgctgctgctgctgctgctgctgctgctgctgctgctgctgctgctgggtctagagccatctctgggccctgtaggtattggccacttctggccatcacccacagcagccacagctgggacggagcagagcatgagatggcaggaatggcattgaggccaaataggcaatgacaggcacattccctcaatccgttcacctctcagtcttgctttctcttaattcttctacattgctcttttccttccctcactacatgcaattgacccacgttcattgagcacctaacatgtgccaggaattgggctagaattggggggacaagaggagtggatttggaaatataaaagcagtgacctgttttcaagctgcttacagatcagaaatacccctctcacagtttttttttttttttttttttttttttttttttttttttttttggggaggcgggaagataagcttctagaaatgagtccttttaagttccctccacttttcccttactggagttctttttgtttaaatcttagggcagcttcttaccgatttgctcagtcagtgggcaacactgagaatctacatcatacattggactctgctaggagcagtgagagaaaagaagcatattctttagggcctttacccctgaggaccttacaagctaatgaggggatacttacatacatgatggagggaatagaatcgtgatgggacaggttgatgggctgatttcttagacactatttgtacgacagacgcgactgccatgggagtgagtggggtcagggcaagcttcatggggaaggaggctcggcctggacctagggaatggggggaatgcatcccaagagaggaatatacaggaaacttagccagatgtgcacacggctcaccctcctgcttcttgccccaaagctgccactgtcatcagcctctgggctatggaaacatccaacatcagagggcagaaatgcaacagagttctgattattctcttttccacacagttttagtacaatgaccttgggtgagtcatttgaccatttggggcctcggtttgtgacaaagagatacttaccctattcccaattacagggatctgaacagatcaaatcttgttccatcctgctgtcagatccaggactcacatgagacatgggtttggggggttggttctgatttacctggaggagaatagaatcctcatgaggaccagcagaagcccttggtccttcctcctgcccaacagtcccatctattttctcttttctcccatagcacctgtcttggagctgctggggcacttggagagacgctcaggttcattcttctaggtggatagtatgtagaacctgcctggctcatgatccccctaggccagcacctatgtcattgtgcgggaagcaatgccctttacagcctgtgtagggacaggctgcccagcagacacgctgggcagaggctgatgtgggatgggctgctcctggtcccttgccctccttccccagccctctgccccagcactgctcctctaatgctgtcccacgcttgtttgtgcctgcaaacacttctggactcattggctgtccccataatgaacagtgacagttcatcatattaccagcttgcttctctggcagggaggttaagggctggagtgactcattagcatctacctggaagggcaccaggcagtctcgctttccctcctcccagggtcatgctcttcttcccaggctcctggttgcagctctaagctgtgtgtccccttccactggtgtgtcgtgagtagttatgaagagggttccagtaatttgttgctcaatagtagtgacaccaggagaggatgtaccttattcacttttgaaaatttggaacagtcaccttcactcactagaattccaaggtgctttcttgggtaggagagaaaaggtagagtcaccaggagctgggagagcatgctttgggtttgtccctgggaacacgagtgtgaatgaatgtcatccatgagattggttgctgtcagaggaggattgggaacaagtctgctgtcagtcctcagcctcctgactgttggttgggataggcagatgaaggtggattgtcgtggatagatatttccagggtatcttccaaaacagcatgtcttaaatatgaatgacatataaatcacctgaggatcttgttaaaatgccaactgaggcgggtcatggtggctcacacctgtaatctcagcattttgggaggctgaggtgggcgtatcacctggggtcaggcgtttgagaccagcctggccaacatggtgaaaccccatctctactaaaagtacaaaaattagccaggtgtggtggtgggtgcctgttatcccagctattcaggaggctgaggcgggagaatcactggaacctgggaggcagaggttgcagtgagccgagaccatgccattgcactctagcctgggtgacagagcgagactccatctcaaaaaaaaaaaaaagccaacttattcagtagatctgggtgaggctagttggggacttccaggttctggtgtaaaaaatgggaaatttgttgaggtttctaaaatgaagccatcctcgacttcttcaaataaagctctgatggttgaatgctttctaaatggtctctcttttcctatggctactaaacggaggccagggcagaccccagtaaccatgccagaggttggctacacatgcatatgttcatatgctattctggaatgcttggcctactcctgaaaaatcattacataatacttctccagttaattgcaatcacagaagaatcaaaatgtaaagctgaagaagattttagaaaatctctaccattctgtcggtttagggatgctgaaaccaggtccaaatgcttaagttactcgcttggcacctaatatagggactgacccatcagtattgattgatccaattaatgaaatggccagtatcatatcttataaagtccatctgaacaaggaccttttttgtcattgttttttgagactttctacatgaggagttgcaaccctatgtctacagaggctgaggacctaatgtagccaaggggagagggctgggggtgggccttagggagataaatgacacttgatttttccagagaaaccagaaatctagaggtaggtgaaatttcatttaaaactattggcagctaattcaaatttaaaacaggatgctacatcaccaaacaagacaagtggtctaggcaacttgttttcagcctctgatcttcatggatgtcagggattaaaaagtgatcttagttcattcagtgtgtttggatgtcatgatgcagtgccaaggcttaggaaatactttccttgttagcctagtcagaaagagagtttcttctttaagaagggaagcttaggccaggcatggtggctcacacctgtaatcccagcactttgggaaggtgaggcaggcggatcacgaggtcgggagtttgagaccagcctggccaacatggcgaaaccctgtcttttctaaaaatacaaaaattagccgggcgtggtggtgggcacctgtaattccagctacttgggaggctgaggcaggagaatcgcttgaacccaggaggtggaggttgcagtgagctgagatcatgccattgtactccagcctgggccacaagagcaagacttcatctcaaagaaaaaaaaaggaaagcttgctaacagttaggatgtgggagatgaattggactacaaaattctctctccacggaaccagaataagagatgtttgaaagatttaactcagcttggaacacgcttggaagttgcttcagtatggggatcttcattactccaagccaagtacctggggatttttatgagcttaactgctcccttaatgagaaatccataaaaggcttccagtatttacctacacatggggttagaagttccaagtatgctgcaatctcaggacagttggaacaggtacaaagtgtaggcacctgtttatctaatagaagtatctcataaatgtttcattgaagtacaacatacctcagaaaagcacagaggaggattccatacaaggaatttttgcaaactgaacatatttgtgtatccagcactcaagtaaaaaacaatatgactagaattctagaagcccttcatgcctccttttctagtcactaacctctctatttccatgccacgagggggaccacgattccaacttccaatagtgtagattatctgtgtgtgtgagtgtgtgtgtgtgtgtgtgtgtgtgtggagtggtgtagtgtgtgccttatttttctcaacattctttgtaagattaattcatccatattgtgtgtagttgtgttgctgtcatgtatcattgctctaagtattccattctgtgtatatactactatttatccattcttctgttgatgggtatttgggtactttccatttgggatgctgctatgagacttccagtacacttcttttggtgaacacatgcacacatttctttgagacaaatgcctaggaatggaatggctgggtcatcaggtatgcatacgttaagctctagtgaatgttgccaaatagctttacaaagtgactgcaaaaatttacattcctgccgctagcatatgggagctctggtcactccacattcgcataaacacttattaaaaaagaaaagtttagatttttatttagtggtggtagtgtatcagatcactgatttaattagcatcttcctgaagactgacaaagtcaaagcctttttaaaaaatatatttaatggccatttggataacctcacctgtgaccagactattcaaatattttgaccattaaaacatgtggcttgtcctttcattctctaactggtgtctttggataagtagaggttcttaactttagtgttgaccaatttatcaacttttcttgtctttatgcttagcccttttgtgtcctatttaaaaaatctttgtctaccccaaggtcacgaagatgttttccttgaaaagttttacctgtcacattttgaatacaaatctgaggaagcgtctttgcatcttctagtgatattttttcccgggctcagtgaatctacggcagggctgaggggtaataaatccataatggtaggagcaaggagccaaaatcagacttcaggctcttccagttatcagctgtttaacgttaggcaattgtttaagcttgctgtgcctcagtttcccaggggtaataatcctgccttcttcatagttttctggtaagggcccattatgtcaatacaaggctgagaactgtacctggcatgaaacaaacatcactaagcgttagttattattattgggcttattttaacaagctaagggcaagaagaagcaggaagaggagagaaagaaggagagggaaatcagtgtgttgcaaatgttggagagaatggaagaaaggggtagaaagccatttatctctacccaacactcttaaattaggtgatgggtcataaactgtcagagtacaaaagccagaagcttccaataaataaagaaaaatatttggggataaataaataagaaagtccagattatcaacaaacatcctggtcacattgagccttttcctggggttgggaagaatgggccacagtcttactaattattttaaactcatagataggtgataatttattaagccagttaatatgaagggaagctgtggtttggggaaaagtcagctgtgctgacaatccagcaattgagttttccatccccacttcctagagtcagatcctcacctgggcaaaattgccctccaggcaattttggtagacattaaaattctagactagtgatcctcagactttgaatgtggatcagaatcacctggagggctaccctcactttctaattcaatagacccgaggttggaactgagaaatctcaagtctgacaagtttctgggagatgtggaggctgcttctccagggaccatgctttgaaaacaactgacataaactaagagttggcaaactacatcccgtgggccaatctggcctgctgcctgtttatatgtggcccacaaactgagaatggttttcacatctttaaatgtttgggaaaaaaagggtattttgtgacacatccaaattatgtgaaattcaaatttcagtatccataaacaaagctttattggaacacagccacgtgcattcatttatgtgttgtctgtggctgcttttgtgccacaattgcagagttgagtagttgtgagagagaccgtggggcccacacacaatatttacttttgtctctatatctttttcacattagcgacgccaatcaacctgacaccataaaaccccctgagaagtccttgcctacggctgcttgctgagggaaacggctgcagaaagttactgacaggtgtccttgttctgtgccacatgtgtctaatttgacttgtactggacacatgatcgaaggtctggtcagtgacgtgtgtctctcctcacagctaatcaggttcacctttatgaggatcttaactagttatgtgggtaggcaattgttcattgctgcagagagtataagctaaaaaattcctaagccccctcaaccgactggacagatcccctcttggccaaggagaccccacagcaaacttaagaactgggttcccagccatgatggaatgggaggcaaaacatgtctccttataccccacccttttgtggtttagacacaacaactcatcagcattcatgttaaagtagggatcatcagactgacaatagaatatcaaattataaacagtacctaaggccatgccatgcaagggttaagtcatgcaggctacacctaaataataaactatgttctaactgccacaagggttttatttttctctagcagctgaacaagcactggcctcaagttaaataatatgaaaacaatgacaattcatccagccccacaggcactgactgagcccctgttccaccagccatgactactgcttcggttggacaagagactgatttcaggaactttctccagataagaagaccaccaaccatggacgggttctggccggtttacagaggctgtgcagttgagtgccttcatgtcctgaaaagaccttatgacatactatgcctaactgtcatatattgaaatattaagtcttcaccctaaggtgaacatgggtcgtatgttacatgcatgcttgttcaatatgcatgtgtggggaccacttttatgaatattcatagcctctcctataacctgttgaatatgtatgttcaggcaacccggtcagcataaagctcctgccctaacccctcatcctttgaaatgcttgtctctggtcttggctggaggctgtatttcccagcctactggatggccacctcgcaggatgtaaccccttacaagaaatagtctcccctctcttttccaaatgtatacatgtttttttttaggttaacaggtgctaaagtaaaataaaaaatgcagagagaggggacaatgcacatctatcacaaggcagaagcagccatggggatgctgacattgtgagggtgaagggcaatcagctgtcctgaggcagaggagagctgagttaacagccaagcactagggtggagatcagaaaacactccatggaaggggcagcaggaagacctggtcactaagctgctttgtgccttgaagaacgtgtctgcctcctgagccagggggtcccaattcctgcaggatccctggccccatgggagtcctgctggtagacagggatagtgactgttctttggcagcaagagtaggacgtctctcagtgcacggatactctggccttaccagcgtgggaggctcccacacacaccacccacatgtggctcagcttggactggtccccacacccccatgcacctaaatcttactcttcaagacttcccacttgtaaaccttcccagatcttccttgcttctcctgttcttcctgaccagtaatgcatcttccctcagacctatcctgtggccagtggctctctacctttcactatgactttttttttttaagtcacccattacaggtttgaaaagtgacttgaagaatgagccttttttttttgtccctgtcagtcccagcagaggccttgcacatggtgaaagctcgagatcacagacggtcaggtcatcctgctctgacatgaccaccccacccctacccaccatggccattttacagagcagaagactgaggcccagagaagtgatgagatttgacaacgttagtctgccaagtctcatctcgtctgggacaggaagagccgatgtccctggtgggttcctgtttaaagccccagcctccttcacacttctaaatcccttctccacacttcagatgagggaacctgagttaatttcaagggctttcaatgaccatttgcaattaactgtatgggaaatatcttcagtcaattagctttggcacttttctagggctgtcaccaacctgctctggagcaatcagacttaattatcttgttgtcttttcttctttgttttttaacgttaatctcatttgtgagggtttctgtaaacaactgggtaagcagagacttaatttgaatgaagacaatttggacaaagtaactgtattttaccaaaaactggaaggctttaaaaacctcagttgagtctgtcctatagtttatggggtcttcatgttctcctaaaatcactagaattcagctcctagggaacagaaatttaaccctatagggaagctcactttttcttttggcttgttttttgagcagcaaagagcacagaagaggaactcaggaggggacagccagtgttttgtttgggttcaacctcttcagacccagtaataaacttactgaattaaactaaacagccctttaatagcagtaactgatggctgcttagggagggagcaagatgcagcacagcatttaaaaacgagacacaaggaagattagcaggggtttgcagtgagcacttgtctcttctgcctacttccccatgaattctgcctccaagagtggcatccttattttctttagcaaccagtcccctgccaggactaggaaaatccttgccatttgaggaaggatgagccaccaccacccagttctagttatgggcagctggtcaactgcactgcattatctggccacagttgttggcttgggatggaaaaacgacctaggctgggccactgagggtcaatcttgggacattttctgagctgccatctttctgtgggtggtgctgggttgtaaacatgagtatctggtcctgtcaccagctatgtttccccttcatgagaagagtcagcttcatgagaatgaaggaaaaacaaaggaaagcagaggagagagggagaaagagaggttcctgatgccaacagttgagttgatacctgaatcaaggtacatccttgactattagtttatttggctaataattcacttttttccttcttaatgaaatttgtgtcacaactcaaagactccttacaaatataatgtttgacaaaacattatcaaggtaaaaaaaatgatgacttaatgaccaggtatggtggccaatgcctgtaatccctggactttgggaggccaaggcaggaggattgcttgagcccagaaatcaggagttcaaggcttcagtgagctaggatggcaccactgcactccagcctgggcaacagagtgagactccatctctcttaaaaaaaaaaaaaaaaagatgacttactatttattgtcaaccatatgcaagtagtaaaaaagtaaagacttaattgaagctccctgcaaagcctgaatgataaatcaaggtaggatgaatcttacgaaaggaataacccaacattttgcttctgttcctccatggccctggggcacttgtagccttcagaatcctcaagaagttgggcgatgacctttcagtggcttccgtctcaggcacttctctgatgacaggtccagagatggctcagctgtgtcttggctgtctggagtctgtaaacattgccactcctatctggcatgcagcaccaggggtgctggccaggattcctgataactggctgtgtgatcttgggaatggcacactgctaccccttttctcaaatgccccacaacaaggtggccaggctagctttggcatggtttccaggggtccaatctgtgatgccagcttcttcctgtatgaggcccctcaagaccccctttgagtccttgtgttactttgcccaatggcagctcccttcctggggaactcacattcctgacccatgcgagatcgcaaacagccctccctactgcagcctgggttctccagagctcctggttttccctctgaaagtcagcatgacgtcagcacgacatcagcatgccacactccactgtacttttgtttccctcactccttgacattggctcagaaagaagagagaattccgtacagagcttttgctagaattatgcttttggtccccaggaggttattgagggatctaagagagttgggaacacggacggctatcggaattgacacatgattctggatcctggcaaaatgtactggggagggacagataggaggctttgtacctattgccactgacattcatcacacaactgaaaagtgagcaagacaagaaaccctcagtgcgaatttgaagagaaacaagagaagagctggacacaagtctcatccctgtgggcagaggcagcctggtctttaatcgggggagaactgaactttaaggcttcacatgtgtcctgcaggaaggaggaggatgctgtgcccttagtgggctgggttcaggggcatctgtcaaccccactttctgcactgcagctggccatctggccatgtgcccagctctgagcatgtcctgggtcctgtctagcacactagcgaatcaataaactgaaatgtcatgcttccgggagccatccgtcgtggtaaatgttgctgctcaataaatgtccacagagggtaacaaactctgtcttgcagaggaccttttggccaccacgtgctctcttgatcctcccattggaatcatcatagggctcccctgggttcaaatttaataggaagggatgagagcctgcttctgagcctgaagcaaagcatactgttttttgttttgtttttgttcgtttgtttgtttttcctgaagggctgggcgcccataagctggcatcctaaccccagaaactttgtggttatcattggtgctgtttgccaaacatttgcaattctctccacatctggtgcagggtggctgcaccctggctcctggctatacttcctgactcctctgtgattgaatgcatctaaatgattagttttgatcaatgtgctgtgaacataagtgacatggtttgcttttcagactggagcatttacttgttgatccaagaccctcttgacatgtctttccttttgatatggcgacccagaaggttaaacatggtggcttcatcatcagcctgagtccctgagtgactccaatgaactgagccctctgccatcttcagtggacacatagcatgtgcaaaaaatccacttttattgttgaatttattgacatttggagagtcatttgttaatgcagcatagacctaacctattctgactgatacaggctccagagtaatcagacgtctaaaagaaaggcaaaaataccaactgaacctctcacctgccctaagcatctaaaataaccatataaaccatgctgcagaattaaaagttgcccttctggttaagcatggctgcttctgcaacactggagagatttccggttatatctccagaagagtcctagcacacagaaaaatgaggcatcttcctgggcccactgatgttctttttccaagcagagcagacctgaggaaacttctgatctcagggaagaaagcacagagtaagttggaaatgtctcaggactcaagtggaggtgtaactgcctgtttcatttgctcatcctggaaacttgtctagaaaaggtgtcaggcttgggaaagtgacatatggtggagctttgcctgtagcattggcctagagagtttgaatgaggacacgaggttacctcatgttcctccaggaagcaactttagtctctgagtcccagcctgtgctgaagttgggaggctgagcccacaggagctgcagtagggaagtaggtgtgtgttctagggatttaggaggggacagagaaagcagggcatcacccaatgtatgggtgagagaggctatccctggcactgcttccaaaacacaagcggaggaaaggctgggccttctctccttgtcccaacctagccccaggtagggcatgtcctagcggccacttgttggagtcaaagagtacctccttctctctcccagcagggaggggtatcaggactggtgtttctgatgtagctctgtattcagactgctctatagatgcacaggatggacaaggggaatggatcactgacttctgcattgcagaatcccaggcctcaaagagaccctcttcaaagcatcttcaccactgctgttgagctctccagcttcatttccagaaggctgctggctgtgcagttcagagttcaatgccaaaacttggagaaggcaggaagtatagctttctcctatctctaggagggcacaatgcaggtcaagggtagaaaccatttttctggcaggagcttttattgcttttaatattggggaggggggcatagtgtcatctgctggttgttcaggaacagcgaatccctgtgtaggtgctttctgggtcacagccctgcttccacctgtctgcatctgctcacttgcgtggttcacaatcaatactgacaaagtggtggctttttggataagtgagatagcaaggaaaaaaaattcctactttaagtcagattagctctgagcatcctggagggctaggggttctccagggggtacatctctctcctttccttgtcacacttcccactggttgtgacatcagcaagtcattactggccacctcacttacctggagttctgggtttgctcccagctctggactctgggccaactgaaattctgagcaggttccaccaaatctacccttacatcctagcagtgatgctttatatccctttcacaacaatacctttcattctagaactctttctactttcacggttattactgcattcacctctcacaggcctttcaagaattgaaaaatgaatttccataatgtaagtatagtatctgcagttcctttatcaccaccaggaaaaccaaaaccacttacagaaacattcagttaaggacagcatggctttttgtaaataaaaaagacacatatttttattcttttccatctcatctttctccctctgcgtttccataatgcattttacccttttaggaggcctttcttctgattgtgttatatacattctcactttaggacttctgcaatctcaggaagtatttaagcccagtatccttattctttgttcttgttttactctcttttctttcaacaaagcactggaaatccttatttttatttttggaaattgcagttgctttttttttcttcccagtctgctctcccccagtaaactaaaaataaaattctaagccctccaactgactggacaaatcccctcttggccaatgggaccctagggaaaccttaaaaactgagtttgtggccatgaaaagacaggaggtgagacacaccttgttatatatcttctcttttgcactttagacataacaaatgaccagcactaatgttaaaatagagatcacaggactgagagaatggactctttgtggcaataagataccaaactacaaacaagacctaaggccggccgggcgcggtggctcacgcctgtaatcccagcactttgggaggccgaggcgggcggatcacgaggtcaggagatcgagaccatcctggctaacacggtgaaaccccgtctccactaaaaatacaaaaaattagccaggcgtggtggcgggcgcctgtagtcccagcttcttgagaggctgaggcaggagaatggcatgaacccgggaggcggagcttgcgatgagccaagattgacccactgcactccagcctgggtgacagagtaagactccgtctcaaaacaaacaaacaaacaaacaaaaacaaacaaacaaaaaaacctaaggccatgccaggcaagggttaagtcatgtaccttacactcaaagaataaactgtgttctaacttcccaggggattttctttttctctagcagctaaacaagcactggcctcaaggtaagcaatattaaaacaatgacaacacatccagctcacagatgctgactaactgaccccctgttctatcagccatgactatagctttgattggacaagagactgatttcagtaactttctccagctaagaagaccaccgaccatggactgggctctggctagtttacagaggttgcacatttgagtgcctttgtgtcctgaaaagaccttttgacatatagggtctaattgtaattcatcaaaatgttaaatctctactccaaggtggccatgggttgtatgtaacatgcatttttttgttcaacatacatgcatcaggaccccttcatgaacatagctcctcctataacctattgaatatgtatgtttggccaacctgttccgcttaaaattcctgtcaaacccttccctccctcccttgaaatttgcctgcctctgggctttgactggagactatgcttcccagcttctcaaaatggccatcttgcaggctataacacttgataagaaataaagctctcctttccaaatttgtgaacactcacgattttttagttaacacctctaatatttttcaacttgctccaaaacttacgtaacattttcagatagccagtgttttcctttgtacgctctttgagttctacaggtgttttcttccttaattaacctccttaaaataaaactaggcactcattcattcattttctcattcactcattcatataaccattcagaaatatttattgaacacctactatgtgctagacactgttctgggtactggagaactggagacagcagcgaatgagataggcataatccctgcccatgtgatcttatatttttataggggagactaacaaagatttaagtaattaagaatcattatctcagaaagtgatacatgctctgaagatcaataaaacagagtaggttgataaaaggtgatgggggccaagtgttttaaaaaagggttaaggagacctctttgaggaagtgatgttaaagaagagaactgaatgaggcaatggaggcagccatgccctacaggaggaggagacaccatgcaggaaagcccaaaggcaggaaggcacttggtacattcaaggaacagcaaggaggccagtgtggctgagcttgatgagtggggtgagaggggcaagagtggggccagagaagtgggtgggggccttctaggtcataagcagaccttggagttggtctaagtgggataaaatgcactgtagagtgacaagtaggtggtgacatcatctggttcatggtttagaaagacaactctggccgggcgcggtggcttacacctgtaactccagcactttgggaggccaaggcaggcggatcgtgaggtcaagagattgagaccatcctggccaacatggtgaaacctcgtctctactaaaaatacaaaaattagctgggcgtggtggcatgcacctatagtcccagctacttgggagggtgaggcaggagaatcgcttgaacccaggagacagaggttgcagtgagccaagattgtgccactgcacgatgacagagtgagacttcatcagacttctgggggaagaattgagagcatatggcaatggaaaaagagagttcatttaggaggccattgcagaagtccaagaaagatagcagtccattggataggatggaaacctggagatcaggggaagcaatgaattcaagacgtaccatgagggtagagctgatagtaactgctcacaggctgcacttaggggacgaagaaagagaggcccatggaccacccttaggtttctggcctcagtaaaactggatgaacaacttctatcaaggaggtaggaaaaacggtggagaaataacgtgtggcaaagaattacgggttcaggttaaaacgtattaggcttaatagataaatggagatatgggagaaagcaactgaataattaatggagctgtagatatggacttggggtagaaataatgtttaaagtcacaggaccaggtgagatcaccaggaagtgaagagggagaagaaaagcagtgcaaggacttattagccatagggaacttcaaattttaaaggttaagaaggaaggtggaaatcagcaaagaagatttagaagcagcagcctgtcatataggaggaaaatcagcagagtaatggctcctggaatccaagtgaggaaaacacttcaaggagggcatgataaatgatgtcaacccttgtgcaccttacagcaaaactataaggcacaaaacatggtctttgttttgtagctagggaaattagtccttaaagaaatgaggtggtctgcctagagggatgcaaactgttggaaacagaaccaagcatacaactacataccagggtgccctttcccttaactcatgccacagatctccttttctgcattcccaagaggggagaggcctgagagggtcagcaacagtaccaatagggagcagagccagcgcaattctgctctttctggtggcttgactgaggaggaccttaacacccttcacagagacacaaagagttgggtgttggcttctattttcctgatgtgcatctttcagaaggtagaggatgatgcagccaagggctagaaggctttaccatgtaagcaagtatttgtacctttccagaaggtgaagtcctggccttgtaaaccatcacagcctggattaagttacggctgagcagaataaaggtctctctttgattagctagaagttctgaggctccaagaaaatccctcagaaaacatattcccagttcttatttttaattaatgactgacattgggagatatagctcggtgggtatctatttccaagatagaatgcacagagaagggaagaattgtgcctcaggaggtttccctctcttaatctgactccagctgactctcctgtaaatagtgtaataggagaggtaaatcgtctgtgatgaggttcatgccggccttgcctctgaactgcactaccatccatctggtggtgctagccaggaaaactgtttctcactcactccccatgttggacttagcaccaagtcttggcagttttacctcccaagtatctctcaaacttaatcatgtctttccatctccactgctactgctaggatccaagccaccattagccttggctggactccactgatagagactcctaattggtttccccacctctactctgaaccctccgatctgctttccatgctgcagtacaatcttttcaccctctgcatagaacccttcaatgtttcccattgatcttatgataaagaccgaactccacagcatgacccctgctcacaccttccttctgatctaaactgaaacatcattctctcatgaaaaccttctcggaccaccctgtggatcatggatgcctttgttatctgctctctcaaagccacattccttcacctcacagcatttacctcagtttggaatgatgagcttcatactgcgatggtttggttgatatctgtctttaccactggacagaaagtcccatgacctgtctgttttttcattccactgtgtccccagctgcatctccacagctgccacattaaagaaggaatgacagtgtgaaggaggctgagtatagccaagatgagttcattcagagaagaaacaagggggaatccattgcccttggagaactgggtgcaatagcctgacagcagtgagttttgctctgttcccaacgtacttctgcaggtcttagcctaggctcctctcagagtccgataacttcatctacagatgctacccctgtttgctctatctgctgcccctgaacgtcattaacttcagcccctctttagatctccacaagaaatacactcccaccaaccatgttgtatatttccttaaaatgtggcactcatggggaggagtcacctggaagacagccttactatcttcacctttccccatctctgctcttccttctattccttcctggattgcctctccattctccccacctccagagctctccaaattctcccttttttatacatatcactttccttgttcctttgcaatcttgatgccactcaatgctcagattggagaaagatctcagcttctctccccaaggttgcacacagaaacccatgtagaacctgagaacaaaagcccttgcccttagtatgatataagctccttaaagaacattcagcattataaagggtaagagaatctgcccactgcccagtcatgaaaacaagctacaacatagagatggtagaatctagaatgctttaataaaaacaacactagagctagttcttagccttttctgggacatcactctggtgtgaccttaatgaaaacagggactcttattaaaaccactgaggagtttagaaaactgtggtatcccaggtcttcctcatcattggagattctggtttaattgtttgaatggggcccggcattggtatttgtaagactacccagatgattctaatgtgcatccagctctgactatttctgatggaacatctctttccttttataggtgaggaaattgaggctcagagagcaaatctgtagcttaacagacatcctgttggtcataattctatttttaaatggtttaaaagctcagtttgtccttttgaatctcagcatcctcattcttggattctttatttatatcccaaatggctggacacctttgaatttcttctttcagagaggagagatggtgttaaactttttaccttctggcctataagcagtttcccattgcattcttactcagatggccactttggtggtataaatgcagcaccccgaactgtagtgtgaatcacttagggaacttgttaagtgcagactaattgagaagatctgggtacaggttgagatgctacattcacatttctgacatgcttctagttgatgctgatactgctggtcgggggaccacagtttgagtagcaagagtgaagtggagtgttacagtttctgttttcccaccagactttctgcctcattttgtcaagggcttttataaaaatgtatcttcttttttcttgagaaccccatccttaaccacagggattgctagcatgttattggagaagttccattttccctgaggttatactaagaagtgtgttaggaggagcagccagggaacatcatgcctgttatattgggatactgtctgctaacgccaagcagagccaaagtgagaggtggacggaaaggtctgatggctgatgtcatcatttgagcctctgaatttaactacctacagatttatcccggagttttccagttaccttagttgataaacccatgccacttttttctctttaggctgacctaagtgtgttaaaaacctaatgggctaagttaaggtggtttccaaggtggtgagaatgttaccaattctggttgggaatttggaaatgtttattatgcaacagtgaagcaactggttaagctgttacctatagagttgaagctctttccatcttaggactttgtccaaggtgcatattgaaactgcagctttagaaaaatgtcagaatgttggtaagcaacaagatcttcaaaaaaacaaataacaacaacaacaacaaaacgacaaaaaacaaagatgtcagaatgttgaagtaggtggtctttttctttctttttttggaaactaataaatattctgaataaattactaaattttagtttcagctacctgtctgaaggcagaaaaagaatatcatgcaactgtggtgtgtgcaatcagctaagacagtatccagtcatatcatcacacagcctgacaaattctttgtatgaaattccagttaatgcaaggaaggagagagagagtgagaaattgcattacttatccgttattgcatagcaaattaccccgaaatgtagtggcttaagacaacaaacattgattcctgtccagtatctgtagggtaggaattccagcaaagcatagataagtgaccctggctcacagtcccctctcacaaagctacactcagggtgttagctggagctatgctctcatctgaagactctccttggggtagcaggagtacttgcttctaagctgtctcatgtgactggcagactggatcccttgctatgtaggcctgtttacttgattgccccataacatgatagctggcttctccagggtgaatgattgaggagagagcaaaagaggaggtgcccaagacagaagccatagtctttttataacccaatgtcttagaaacctgtcaataagtccaggccatgctcaataggctggtgtgaatatcaggaggtaatgctcactggaggtgatcttagaagctgtctaccacagaaactcattgagaagtaagattacaacccttgaaggtataccaagtccctcctaaatgacttctgctgtctatccttttttaaaaaaagtagatatggagtcttgctctgtcacccaggctggagtacggtggtgtgatcacagctccctgcagtctttacctccagggcacaattgattgtcccacctcagccttccaagtagctggaactataggtgcacactaccatgcatagataaattttgtatttttttttttaatatagagacagggttctgttatgttgcccaggctggtcttgaactcctgagctcaagagatctgtccactggcctcctaaagttctgggatttcaggcatgagccaccacgtctggcctgttttttatcagagtcaaaaccttccctccacatggggacaaaaaggacaataattctgcctgagcacttggtgatgggcagaggcagcagccgcaagtgaagctataaggtttggttctaggccttgatgggaggaggattctggcctgttgctaaaagccagaaacagcatcccagtagaactcagatgcagagatcctggcactcatggagatgagggatggttatccagagtgttgagaactcaaattgatcaactgttaactcagttttaaggagactgtacaaggagagaaactcaaagcctggccaacaggggccatgcttattgatctcttctaagatctgaggtctgtgtcacctggcctatagaaatgcactgctaagcaggtattgttaccctttctcctttgcacccctctcagaaatgggccatgatagccaagagagcagaaaacaggcagcccaatggaccgattgaggacttctctcaccaccaggcaggaaacccttctgtttctcccctgcaggagcagttatgaccctttggccactgaagtcaattcctctccttcccttttctaaatcagagttactagtgtgttaatcctattttctcactatcactgtaacagcgggcttgtcaaatgtggctaaatctacccatgtgtctcaagttgcaccaggctggggacccacacatgaccttgaatgagagggatgcgcaccttccagatggatttgcaggtggatgcagtggccagatgaaatgctgggctgtcttcctttgaggaaaagctatgtgagtgttttgattatgtcccagattatagcatcatgttggctgagaacaatttgtgggaatgaataaaaagaaagaagggcgcttgagtgtcagatcataagactgaagagagtggaatgtggtagctgtggctgtgttcttttggcatgatttctcatctccttttcccctagttctttgggggaacttctttcgcattctacgggatagtggcgtgattgccatcagactactttgctcctcttccccagggcttctgtctcttgcaatgagaagcattttaactaaaataggtatatatggaatattttgatctcatcctctttccttcataaactttgttgatgacttttgccatttaacattatagaggataatctggaagttaatctatttttataaaatagaaaggtagggccagacgcagtggctcacatctgtaattccagcactttgggaggccaaggcaggcagatcacaagttcaggtgttcaagatcagcctggccaacatggtgaaaccccatctctactaaaaatacaaaaattagctgggcatggtgatgcgcgcctgtaatcccagctactagggaggctgaggcaggagaattgcttgaacggggacccaggaggcagagtttgcagtgagctgagatcgctccactgcactccagcctgggagacagagcgaaactccatctcaaagaacaaaaacaaacacaacaacaacaacaacaaaatagaaaggtaggtaacatgttaaatctatcttattatactttaccctgagttcaaagtatagctctatctagtaggaactctgtctaatatttattgaaggctttttttattttttcttgttgcccaggctggaatgcaatggtgtgatctcagctcactgcaacctcagcctctcaggttcaagcaattctcctgcctcagcatccagagtagctgggattacaggtgcctgccaccatgcccagataatttttgtatttttagtagagacagggtttcaccatgttggccaggctggtctcgaactcctgacctcaggtgatccacccgcctcggactcccagagtgctgggattacaggtgtgagccattgtgcccagccatttattgaagccttttgatctgcaagtttaggtgttcagttttaggataattttatttgcttctgctcaatttcttctattcctcccatcaaatacaccattaatatacattttggctctctcttttctgttatctatttgtagcatcacccctttcatgaatttattttatttttctttttcctcttgattgtgagtgagttgctgatcatattgctgatgtaattttttttgcactgtcgattcttttcttaactctttttgtacgttaaaacgtctcttttcacatgtttaatattgttttctgcttatctcatctagttccctttttataactccttcttaacagctgccttttgatctcactgtattgtcttttgttttaatactgttgacaatacaagacaaatgtctaaaatttatgtctgcttcctgcagtaaatctcttaaaaaagaatgctcttctattgctatggaaatagtatactatccatctgtgtttaggatctcctcttgtatctcattttactttgcttctattttttcatatctgaacaataaagcttctatctgcgtctagaacttgttccccaaaatagatgagtgggttcttctgagatcatctcattgaggtcttaagtgtgagggcagtctgaggactggagagagatctacagtcatggagcagaaaggcaatttcatgaatgggtagtgtcttttctgtggcaaagccactgagctgggcatccatcctggttgtcagattgtcgtgttcctggcccaccatagctggatgagccatagtgttctgcggagtgtgtgtgtgtgtgtgtgtgtgtgtggtggggggtgggggagtgtgtgctgcagcctccagcccattgtttggtgcagctgccatgccctggtctaccaaggtagttaaccatgacattcccattgccccattgcactgctaccctctacatgaagaagaaactccccatctcccataactgccaccaatagtcttatacttgacacatagaacttcctagtgttcaaattttcatttgtgaggtgttactccacatacaacccagaactgacatatagcccttcatgtgttaactcagtgctctttcctatgcctggaatatgtcaatatatatttttcacccttgcaatttctactccttgaatgcctggctcaatggtccttttccatgccaaatacttttgggtttctccagccagagttatttctcctattgtaccttatacatatctctatttcagcacctggtaagttgtgttttaattgcttattcttccgtcttcctagttagcatatgaattctaagttgtcaaggatgtgttttattcatctctgttatcccttctttgttattggcatctaacagactgcttagtaaatgtttataaatgaactaattgagtgaggagacttgaacacttcctttatctttggtttggtggtctgtgtgggagctcagttttgagtgaatgttggaattgcaattctcctaagcacatctgtctgtgctgactgtgtattttgtctgtgacagtcctccctcctggcttgcaaaccagggaacagccgaaaactccaaacacattgtcttccactcctaacaggtacacaatgtttgcaaccaccgcatccctttctctaactcttcaaaaacaagccatgctaactgttaattggaagaggcctttaactctaaaaacaagacaacccactttttcaagttcttgttgctataaatcacactacgtctatagcaagatgcctgtctctctttcctgacaaaactgtagaattgaatatgccaagctctctctgctaggtatgctttactttcaatatttcaaccaaatgtcgaagagacaggagaatgtcttgtctttaaggaaatcctgtctgatgatttagaaggaagattgagatggagcctggtgctaattatattctggttttctctagaattgagttgtatgtttgggagctaggagacgatgggggccgtggtgcagttatatctttagatgcagaaagtatctacaataaatgagagttgcatggttttttgtccaatctgtggatttttttctttcttttttgcaatgtattgaggtataattgctatgtgaaaacctgcacatatttatagtatacaatttgatgtatgtattcacctgtaaaaatatgaccatgatcaaagtagtgtacatgcatatgtataaatctcatggatttatgtgacatcaggatcaaaggttctacatccacaagggcttatacattttgtcagtttttaacctgttgcagacattgatttgatttttttttttcttgtcacctggcctttaagctcttctcaagttttcttttcttttttcttttcttctttttccttttttttttttttttgagatgaagtctcactctgtcaccaggctggagtgcagttgtgcagtcttggctcactgcaacctctgactccctggttcaagcgattctcctgcctcagcctcccaagtggctgggactacaggcacgtgccaccacacccagctaatttttgtatttttagtagagacagggtttcaccatgttggctaggatggtctcgatctcctgaccttgtgatccacccgccttggcttcctaaagtgttgggattacaggcgtgagtcaccgtgttcggcctaggttttattttctctgtcatcttagctttctacatcggagtgatttttgttttccattgacactgatgctggttagtctgtatccactaacattgtatgtgtcagggaaaaaggatttcattcattgtggttctgccctctctcccattgaatcacagttctctgattgggtcttcttccagagcccttgaagaccctcttccacattctgaccactactccaaccatgtggatggaagtgagtatttctaccaccttctcccccatgggagaatcgttcccatggcttcataaccctttgtgcatgttgatgctcaattctgccttcctcttaatcatagtttcttcactcaccagtcagtgatagctgtagggtcttcaggttttagctaacatgctaacaggattctggtggtgatcttactccaacatgagatttctcatctgatatccactaatatgggaagcattgcacacttggaatgaaaaagaaaaaggttgttaggctgtcatataggtttaatctgaaagcatagctgaaagcatcttaactcagactagaaagttgttactcagattgccaccccctgaaaaggggtaattcatttcccttttcccagacaaaatacttgaaatcaggctagaatcatacagtcttcaaattaccttgtgatcacttgtttgatacacaggacagagtcatttctccagggaaccataaagcttgttttacaaatactgtttgaaacaagcaggtcatccatggggttggaaatccttttaccaggggaagattcttataggtgtaataattataatgtaatttactctgtgttttgttgctgtagcatgtttactgcccagtttggcaaaagctggaggaggcaacaggattgagcaaagtttgggcaaaactgggtatatttgtagataaggtggttatcacacatgctcaagaaagacagagactaccattcaatccagcaatcccactactgggtatttacccaaaggaaaagaagtcattatatgaaaaagacacttacacatgcatgtttatagcagcacactacacaactgcaaaaatataaaaccagcctaaatgcccatctaccaatgagtggataaagaaagtgtggtatatatacacatagaatactactcagtcataacgaggaatgaaattatgacatttacagcaatgtgaatggagttagagaccattattctaagtgaagtaactcaggaatggaaaaccaactattgtttgttctcacttataagtgggagctaagctatgaggatgcaaagggataagtaatataatggactttggggactcagggggaatgtgggagggagatgagggataaaagactacacattgagtacagcatatactgcccaggtgatgagtgtatcaaaatctcagaaatcaccactaaagaacttatccatgtaaccaaaaacacctggtccccaaaagctattgaaataaataatacaaaaaagaggctgggcatggtggctcatgcctataatcccagcactttgggaggctgaggcaggtggatcacctgaagtcaggagttcaagaccagcctgaccaacatggtgaaactccatctctactgaaaatacaaaattaactgggcatggtggggaatgcctgtaatcccagctacttgggaggatgaggcaggagaatcgcttgaacctgggaggcagaagttgcagtgagccgagattgtgccattgcactccagcctgggcaacaagtgcaaaactccatcaaaaataaaaaaaaagaaagaaagaaaaaaaaattctgctctcaaaaaaagaaagagagagaaaaagggagagagataattataagatagcaaatagaagtagaaaaggattggggacagggattttgaaaacatggaaaaactctgattctagcttataaggataaagattaatgaaaacagacatgtttgtatgtttctgttttggttactatttgatgctgtttggatgtcccaccatagtctcatgttggattgtaatccccaatgttgaatgtaaggcctggtgggaggtgtttgggccatggggacagatccttcatggcttggtgctgttctcctgacagtgagtgagttatctcgagatctgtttgtttaaatgtgttgcacctctactccctcgtccttgttcctgctttcaccacatgacatgcctgctcctgcttcaccttttgccatgagtaaaagctccctgaggaccccctcccccctccagaagccaggcagatgtggcaccatgcttctacagcctgcagaaatgtgagccaattaaacatcttttctttataaattactcagcttcaggcatttccttatagcaatgctagaaaggctgaaagcactattgctgcataacaaactacccacaacttagtgacataaaacaactgttatgctatgctcacaaattctctggctcagccccagccacagcaggaatggcttgtctttgttctaagatacctgggaccagctgggaagactcaatagctgggggctggagttatctggaactatcttcactaacatgcatggcagtcgatgttggctatcaactaggacctcagctgggcctacctcaattggaattcctgcacaggtattctacacacagcctgaactccgtcacaatacagaagcctcagggtagtcagacttcttatatggaatcagtttcaagtatgaatgttctagtgaacaaagggcagttgcattgatttttatgatattgctttggaaggcggaacaaaacttctgttgtattcttgtggtcaaagctgtcacaggtctatgacatgtgacacatgattcaagaggatgggacattggccctaattcttaatgggaatcatgtcaaaaaatttgtaggatattttgttttgtattgttttgctttggagacagggtcagggtctcgctctgttgcctaggctggagcagagtggcatgatcaggactcactgcagcctggaacttctgggttcaagcaatccttccccctcagcctcccaagtagctggaattacagacacacaccaccacacccagcttgggacatattttgaaacgaacacagttttgtaattcacctcatctaccctactctaagcttttaaaggcttcatccagggatcttactatatatgtttgcttcactactgagtgaatctcaatacctcacaataagtagatggtgagtaaaataaatgagttcatgtaagatgatcagaatctttttagataaaataatgcaaaatgtttggaggagttgaattatttagatggcaaagtgtatagaaaaatgtaatatgttcagcaagaaaggaataaaagttcagaaagacagtataaaacatattcgggttttccccttgagactgtgaaccccatgaaggttaatgcagaatctgttactcatctctatctaaaacttccatcggacttgtcatgtaggaaatattgagtaaatacttttgaattggtagagaaaaattagccttaggtctgagtctacacctaaacctctatgaactcaggaacaggggtgaagtcataaccagaggtgataaaaacagacaagaaagagcttgatgtgtctacgagaggacatgatagctgcctttggatattgaaaaaacttctaagcagcatagggtaaagacttcatccatgatgctccaggtgggagaacgggcaccaacggtgaggtgggtttggggttcactttggaaaaagctattcaaccatagaatgaactgtaaactctcccacactaagcttggtagaaaatacttgagctgtatcaggttcaaaatgtttataaggtagaaaacatgtggttcaatcttaactgaagcagatccctaaaaggaataataattcaatgtttgaagcaatctagaaatcttatcaattttggctcaacttaataggaaatttatggacccaaacctatgaaaaataaaacccctataggaaatgcattaataaaaaacatcctttattttgtgtattccaatggttggtttctagtaaaacttctaagagtttagggccagattagaaaagcatgaataagcagtattggaatgtttacaatttctatgtgaggttcatgagcatgggaaggagaaggagaagattctaagactagtggttcctacagtatgtcctccagaagactggcactatcaacattacgtgataatttgtgaaaaattaaaaattttgagctcctcccagacctactgaatcagaaactcagaagtagggctcagatatctgtgttttagtaagatgtctaggtgattctgatacaagtaaaagtttgagaacaactgaattagaccacttttagggacccttctaactgagatcttatttcattaatacatattccacatgaccatacactcctcaaaggcagaaatcacaccttttatttttcatggtttcttacagagactcacagttctggcatctgttagattcataagaagaaaccattagtataatttcagatgttggaccacctcaaaagacttgaaattccatcttcaaattacagattgacatcccttttatttcctgcccttcctgagccttccttgaagctcagtattcaaataggggctgggcactgtggcatgtgcacatactcaggaggctgaggtgagaagattacttgaacccaagaattcaagaccagcccggacaacatagcaagatctcatcgcaaatttttaaaaatagcaattaaaaagaaaagaaactgataagatcttattcagttttccagaaaaatattctgtaaagttggcagaggagcaacttttggatattcagactcaagtgaagagtcagtattcttattactttgggattggatttatgtatgatgaaattgtttttatttgattcttacatacttcctgcaaggaacacatgttatgaaactttaagttaatgtttgattgttctatgcttaaatggcaaatgctaataacagccaaactgaaagatgttgcaaagagtcagaaagcctgtgaaggtagttgacagccttcttttacagatatgccaactgaggcccagagaaatgaagtgctttgcccagggttgcaaagctatttattaatggtacatccaggattagaccccagatcttctgacttccgtgtcaaaacatttaccatgacattagaaattcccaaagcaggatgactgaggtatatctctatttaaaaatcctaagtaaaagtaaatgtcatgatgttttttagagtttagaaacattggtgtatgcatattgcatgcctctattcagaagatatggcatgtctggattaatcttctctattgttactttaagtagaaatgactagtcatgtatttcactaactgaaacacattgaatagaaaataaaatcactgccctagagccctttctgacactaatgtatgcatgtttatctttgccttcatattccactagacaggtgtgtctgtgaggaagcttttaaaagtgttttcaaaggagaaagctgtgcttgtagctctagctagatttgactggcggctgttgagtcatagatgggattgaaagagcccgtggtgatagttcataaaatggattctagagctgctggtttgcccaatgccaggacttgtctctgggcaccaagtaggcactcaagaaattaaaatgacttcctgactttgaggctccatgtcagatattatatatatttgaatttgtttatttaacaaatttatattagagaggccataaggcctaataactaagaacacaagtgttgtagtcagattgagttctaaggccagctctaccccttcacttgcttttaggctttaaacaagttgcttaccctccctgagccttaatttcctaacctataaaaaggggttcatctgttaggattcaatcagagaagcagaactaggagatttggccttatacaattataggtacttgttaaacactgtctgcaaagctcctgtctttgtgacggatgctggttcctgaagcgttcagggcaggcagttgggaaggaaaggtgaatataaggtggagcagaggacgggcaagttgggatgcatgggcatgaatgagagccttcagggaccaatcagaacctgtgtcaattctcattgcttccaacttccatgaagtgggacgagtcctgcaagagaagctgacattcttcatcaaagagctaaacatacacccagctgaggagatagagaaaccaaagttgtatccaggggaaggtggagcagctgtgggtttgactgttagcccaggtcaacgaggtgagccagcagacaagcaaaaagtgcctaagcacaaaaacaaaatggccccacttcacttctgtgctccaaatctggcacgaaagtcgacccaacccagaaacaccgtgaaggggattctgagaaatgtagttcagtcttgcaaggtggacaggtcacacagataccacgtggggtgaaccagaccactctgtagacttgtaattagtgtactgttagtgtgcagcctgagaaaatacacagtgattatgatgatgatgtcgtgtggtttccactgtgaacaacagtctatttcagatatggtagaggccagaaacatgtcttgagctcctattctcaagttctttacattctaacataagaaagaatacatgcagatgagacactataattttaacagttccccacaattacaatgttgcaagaatggcctgttttgaatggaccagtttggggggcttaccctttaaaacattaaaattatttcttattttaatcatttttaatgaatatctttcacacatgcattttacattttctgacatcttacatagtatgaaggaaaacatttaagctttcctgtatgactcagtcatcactgggagtgtcagttaattgcattgttctataacgggaccagttgtatttgaagcaatttaggctgacgctaaattgtcctattgattgacattgttctctcttgttctctgctggcatttgccatgatttttaatctttgtgcctatgatgatatctctcccttcttctaatttgctgcttccaatctgctatcgactgagaaaccagataacaaagcttgtaaaaactatgcacaacatgcaatcacataagcctgatgagaacttgagcaaaacccatttttctgcattttttccctttctcagagcaatgcgatttcaatgcccccataagtagtgtttctttcattttgtagattactaagtaaagaacgacagtatacttttatacaaaatggaggcacttccaacaagtgaggccaagtggtgccttggctctctatgtgaacaaaggtttcctgatagtcccagtcaagaaagccagtgggaggatggagtgatcatacagcacaaggcaatctagatgtgtgggctcagaaggacctccctgtggcagttaggaccattgtcacactggatatggcaatttagtttcagcaagatgtccctagccaatgaagtttatgttagtaactgtagtttttaaattttatattctttgctatttgatttctaaattttataatttaaaaatacctataatgtgggatgcttatacataggttcatatggtgtgtgtagttgcagtaagcgtgcttgtgcacggggaagcattttattttgacaagtaagaataactttcgagtaagcttcggccctatctgtcaaattatgctcatttcagttttctgctcatgttaaggagaaagctttcaattctgcctgtctggggacttctttttccttcagcctttgcactggcagtgttcaattttgctttgtgatgcaatgtagcataatagccaagaaatgggctctggggtcaggcaatgtgggtttgaatctcacttctaacaaatcactagttacgtggccttgagcaagttaaactctgtgtgtctcagtttcctcctccattcagcagagataacacattatatacctgctagggttcttgtggggattagatgattagattcatacaaaatgttaagaacagagcctggcaaaaaaaatgagtgcttcttaaatgttggctattgatattctggcttttctgtcattccagagcctcgaagcataaaatgatgctgaaaagaaatgaaatgaaaggaagatgagccaaaccatgaaagttaatactggcattatgaaaagtattgctatgcatccaatttatttaattataagtggttttaattaatttcaaaagaagatggccatccccatcaatgtttggcagaatgcctgcatttgaggatgaagaaaatattgtgtgtgtgcacatgcgcatgtaatgcttttacgatgaaaaatgacttcaatcatcaattcgaaatcctgttcaaagtgaaatcacatttgcatgacaaacaacacagcatctaccaattagaatcatgtttacttggcagaaagtagagcatttgtgaaaccaaacaccagtgttgcagccacagaggagaactgcattttattcatctttttggtactagcataagacataaaaggtactcaactggtgtctaaagaatgcacgaatgtatcgtttaataagtgacaaacacacagaggaaagaacacagattagctgtctgcagaagggtgagaacaagtgtcaaaaaggaaaaaataaaataacaaaaagagtagattagtggaaatccatattactctcaagctgtaaattgatccagcaatgtaggtctcacctcaattggtcctccatggtaactgcaagatttggggtggtaagaatggtggtgcaaatgtgtgtaaataaagtgtgtgtgtatttgaatgtgtgcactctttaattaatttaatctggctcacccaacctcttctacttgagtccaaaatcacaaaagagaagttaatggcccttcattatcagtcatatcagacagcatatgcaatagctttcttgaaactcagtgcactctttccctaactaggaccattatcttgtcccttaatctataactatgaagggggagagagtaggttctgattttcctcttccgtttggctgctcacttcttttttttttttttttttttttttttttgagacggagtctcgctctgtcgcccaggctggagtgcagtggcgggatctcggctcactgcaagctccgcctcccgggttcacgccattctcctgcctcagcctcccaagtaggtgggactacaggcgcccgccactacgcccggctaattttttgtatttttagtagagacggggtttcaccgttttagccgggatggtctcgatctcctgacctcgtgatccgcccgcctcggcctcccaaagtgctgggattacaggcgtgagccaccgcacccggcctggctgctcacttcttattctcactagaatcagtacataaaagaagaagaagatcctaggaagcttacccttgagggtcttcatgagatggcttaatttgttatcctcatgttcccttcatgtagcatgtcaggtttgctaaccagaaactgctgcaaattttttgcaggaaccactattacctggtcctgcaagtcctacaagaaagtcctcttgggaactctcatcccctcttctcaacctggcttctgccccatgtaaaccacagaaaatctcaggcacaagacaaagggggttcctaatgggtatgagctgtggacatttcttaccttcaagttctttcacttatgccttatcagcctctttggatatttgcttggaattacaagtattaatgtcacttcttgctgtagttgttgtttatgtgcctacagtggtgctgattgccggctgactctgacctccgctcttcagatctatctgagctattgttcagcctcagcaggaggcaaccccaggagcctggctgtgagcctccagctgatgctgttgtgggcaatctcatggcattaataatattgagtgagaagacctgggattgaatctcagctccaactctctccagcttcatgaccatgggcatgttacttcacttctctgagcctaacatccttattgcaaggagaagaactagtctctccctcccagggttattaggaagatcaaaagagataactcatgtgactggaatatggaaaacctgctctggagcagatgcttaaataattattattcctgctttacccctgttgcaatgcttgttatactttcttcacaccatagattttagagaaaaaatgttacaacccattgggataaagagatgaggctcttcaagccagaggtttcagctgacccagacttcagcttacgcggtatgcctgcaaccagccaaggctgtctgcatgccacagcacacctagtgggaagctttgggatggcaagtgtgaatcttgacccttgtgaagaatgtggcctctgaggcagggctacttctatttgctcattgagacacagcaacatgacagtggcaactcacataatggtctctctgcagtgttttcaccatggcgtcccctgcaaagtaaggtgacagttttagggcttcgtccagccccagatacgtagttagccccccgtagatattaactgtcattggctttgtaattactctaatttgaaccaaactgggcctagaataaccaaaaatttgtttttctgtccaatcacttcttcaaaatgctccaccccgtttctcctttctctcccttatgaacatctctgtcagacccgtcagtcttctcatcgttttctggtattaaagaatacaaagaacacagcgggagcttcaatctcattctcatttgttcccaacttctccaccgaccttggctggaggcctcagaatgggacctgtgagtagacttctctttccattccttcttgctttcacatctggtatgttgggatttgcatatggggttggaggaaggggaagcacctttttttgtaaggcagtactggtggcttgcagatttcctatgttagggaagaaagagtacagaggtttttcactccatccttgcacaggtgacctttgccacttccacttacatttattggccaaaactggtcactggccctttccaacttgccacggagctaagaagtgtattgtgctgggtgcccaggaaggagtggagagctgggaccactggggagcactataaatctccatcacaggccatttgtgtggtaagctcgttttaggaaagagtgttgaatgtctacgggagcagatgatgaggagagggagtaatggagctgaaagaccagggactttgctattcgatgatcctgcttcaaaacacatctgcataaattggaacctttgcactgttggtggaaatacagaatggcccagctgctgcggaaaacaatatggaggtttctcagaaaattaaaaatagagctaccatataatccagcaatcctgcttctgactttcctgccccatgtaaagtagtttcctttccttacatacaaaggaaatctaataaatatctcgaagaaataactgcactcccagaaacaaactcacaaacaaacttaccacaaacaaacaaacaaacaaacaaaacccctcaaaacccatgttctttgcagcattattgacaataaccaaggtacggaaatcaccaagtgtctcccacagatgaatagataagaaaatgtgacatatacatattatggagcactattcagccttaaacaaaaatatctggtcatttgcagcaacatggatgagccgtacagacatcatgttaagtgaaaaaacccagtcacagaaggacaaataccgcatgaggttccacttaaacgaggtatctataatagacacagagcagagaatacaatagttgttgccagggactgctgggagggagaaattataacttgttgttcaatggggaaaagttttagttatgctagatgagtaagttctagagatcggctgtataatatagtgcctatggttacactgtaatatagtatactagagtaaacaatacagtgtcatgaaattcaaaatttgttaagagggaagatttcatgttcagtgtgttccttaccacaaacaaacaaacaacccccgcccatccaaaacccaaagagaaacaaggaaactttgaaaggtgtcggatatatgttttaccttaattgtggcgatggtaccacaggcatttgcatatatccaaactccaaattatacacattaaatatgtgtggatgtttggatgccaatgatagctcaatcaaggtgttaaaaagtctgtgttggccaggcacagtggctcatacctgtaaacccagcactttgggaggccaaggcaggcggatcacttgaagtcgggagtttgagaccagcctggcccacatggtgaaaccccatctctactgaaaatacaaaattagcccgatgtggtagtgcatgcctatagtcccagctactcaggaggctgaggcaggagaaatgcttgaaactgggaggcgaggttgcagtgagctgagatcgtgccattgcactccagcctggacaacaggagtgaaactccatctaaaaaaaaaaaaaaaaagggcccagcacggtatcttacacttgtaataccagcactttgggaggccaaggcaggcagatcacgaggtcagaagttcaagaccagcctgacgaacatggtgaaaccctgtctctgctaaaaatacaaaaattagccgggtgtgatggtgcatgcctgtaaccccagctactcagaaggctgaggcaggagaattgcttgaaactgggaggcggaggttgcagtgaggcgagattgcccactgcattccagcctgggtgacagagcgagactcagtctaaaaaaaaaaaaaatctgtgtagcacataaactgggtgatatttgaccatttaattgcctctctaagaggatgtggagaaataggaacacttttacactgttggtgggactgtaaactagttcaaccactgtggaagtcagtgtggcgattcctcagggatctagaactagaaataccatttgacccagccatcccattactgggtatatacccaaaggattataaatcatgctactataaagacacatgcacacgtatgtttattgcggcactattcacagtagcaaagacttggaaccaacccaaatgtccaacaatgatagactggattaagaaaatgtggcacatatacaccatggaatactatgcagccataaaaaatgatgagttcatgtcctttgtagggacatggatgaagctggaaaccatcattctcagcaaactatcgcaaggacaaaaaaccaaacaccgcatgttctcactcataggtgggaattgaacaatgagaacacatggacacaggaaggggaacatcacacaccagggcctgttgtggggtggaggggggaaggatagcattaggagatatacctaatgtaagtgacgagttaatgggtgcagcaaaccaacagggcacatgtatacatatgtaacaaacctgcacgttgtgcacatgtaccctaaaacttaaagtataataaaaaaaaaagaataaaagcagaaggaaaaaaaattacctctctaagcctcagttttcctatctgtaagatagggaaatctttgcaaagggattttgtgaaactaaatcacaagcacaaagcacataatatcttttcattgtatattagggtaagggttttgcatataatcctgtaggctagtagacagtggacttctgtaccctctccccatacttttttctttgaccaccagttttcccatctcctctacccacaagggagaaagacttgctgattttatttctcagagtttggaacccagttggacttttgctttagttttcaaacatgtatcctctttcatctttctcagtttaatatccacacagaagccatagtaatcctcttaaaagatatatcagattttctccttctctctcttgcttaataccttccaatggtttccccatgctcttagaataaactccaaagttctcaccatattcataatgaccttgtcagctccacgttggtctgtctttagtgcctctcccacttcactcatagaaccctccttctcaccctccatgctccagccccactgactattctgagaatgtgctaacatctttcttgcacatgatatttctattcaagtgtgcttcgcctgacttcttgcacaactggcaccttctcattcatcaaatctagttcagatgtctcttatgaaaggccttcatgactcatccaagtcattccagcacccttgtcatttacttaccagtgtagtaccgtgttaatttcctttaaatcacctcccacattttaatatttttcattagcttattcgattgtagtctatttctcccataataatgtaagctcagtggtaggagcaactttatcgtcctgttacgtccccaatgtctagaacagtacctaatatgtattaggtgatcagtaaataataactagaccaataaataaacaaataaataaatacttttaggccagcgttactaccaggcagaatcactatgagcgcaaggctcagcatgcaggagctgacccttccagggtgcatgtggcaagcagacagggctgggagggctaaccagatctctctttctcatctacttcctctgcacctacaattgggtgagtggtttggggatggctctgaaactctgatcatattgagttcagaaagggaagaagcaaggagcccatgcagcattttctatttagctgtgtcagaaagccctacagtggacatagcatatgcttttcatcttttaagtaagaagtacctttgcttagaattctgctattgttcctactataggcccctcagcaatatctgggtatttatgggccctggatataataatatgataacattataacagatcactaatgtattagtgtctcatccagagccaagtgggcaaatgcacagagatgaggatttagggacaaaacaccacttggagatatcgaagctctggaaccatttctagagttcagctctgcccagccttgacagctaacctgataaacagacttaccaagagagaggaataattggggccaagtgaagcatgtcctcgatctcactttgaaataacaggcctctgattatggcccagaatagagagattctttaatgagtgaaaagagatgggctgggaacagtggctcatgcctgtaatcctagcactttgggaggccgaggcaggtggatcgcttgagctcaggagtttgagaccagcctgggcaacacggtgaaaccgtctctactaaaaatacaaaaattagccaggcgtggtggtgcatgctggtagtccctgctacttggcgggggtgaggcagtggatttgcttgaaccggaggccaaggctgcagtgagccgaggtgacaccactgcacttccagcctgagtgacaaagtgaagtcttgtcttaaaaaaaaaaaaaaaaatatatatatatatatatagaaaagaaatggctttatttcttctcaacatagagtgcatgcggggaaggaaggacttgtattggaggggaaaggcagggagggcttacttcaaagtacaaattttagggatgaattttgtgctcaggactggctgccctggaattaattctctctttcagaactgagagacccttaggtgtctaagaagaggtcaagcagtcaagaaaaaaggagagagaaaggaatatatgtcctgtttttggactagtgaattaaataaggctggaagaatctcagaaaagacaaagtttcagggaggaacctgcagaagtttctgggtctctaaagacaggttctggttgctccaaaagcagcacataaggctaagaaagttttgggtttctagaaatctcataaaaagttgatggcagcgtgtattcgtctgttcctgcattgctctaaagaaatacctgagagtgggcaactaatgagaaaagaggtttcattggctcattgttctgcagtctgtacaggaagcatggcagcctctgcttggcttctgggggcgcctcaggaagctttcagttgtggcagaaggcaaaggggtgtgaggcatctcacatggtgggagcagcagcaagagctagagggtgtagttgctacacacttttaaacaaccaaatcttagaagaactcactggctattgtgaggacagaaccaagcggggagagtgctaaaccatttatgagaaatccacccccatgcttcaatcacctcccaccaggccccacccccaacactgggaattgcaattcaacataagacttgctggagacacagatccaaaccatatcacagcataattaacttcctgggggatttctgccagtcaattttaagcccacaggatgattcctggcaaaactgaaaccaagctttctccatcctttccttccagccttctctgtctatctccccaccccagacaacacggttgctgttgtggctccagactagcaatgtgacaccactgctattacatagaaaatgctatttctgcagcaggcatatacatggtctacattgtgtgtatgtatgtgtgtgtgtgtgtgtgtgtgtgtgtgtgtgtatggggtgcaggtggtggtggggtctcttgcacttagaaaccatgcatatctcattgactcaactattcaggttctttgagttaaaggaggtagaaatcctcctcgaccagtttaagcaatataaggaaagtgattggttcatggaactaggggaatcttagggtggctcaagctgcaggttggaatgtctgcagggtttgtacaatatcttcagaattctctgtctttattgctgtctgtctctccccatcactcagctatttgtctctgcttgtctttgtttttagttaagctttgtccatatgataacagaattctgtcctcatcttagacctgtagctccatcactgcttacatgtaatgtaagcttatgttgtctttggaaattttgccttctaaagaaaagcaatgttttataggatgcatttacgtaaatctccccaaagggctttgattcatcttgcttgggtcttgagtccaaactaaaaccaatcaacgtgtttggattgtgggaatgagtttgcaaatgacccctcttcgtgatatgcctaactctgtggtagaagatgcaaagccacctggattgacagccccatcacacaagggctgggaagtcagttaccaaaaggaagggaagcagagcacataagaaagaatgcctgttctgtatgctgaccttttatgcatttggcaagtaggacatgtgagagtttaggattgaattaattctattaccaggaagtgtgggaatcctcagttctcgtctaacttgggagaaagaattcagccaagagacatttagtaacgtaaagcaaaaggtttattaaggagataagagtacactccaagagaagagcgagcttgtgtggctggaaaagtaccagtagcagtgcttatttaaagagaccgtatactctgaaagatgagtcagagtgggctgcttaaaagagagagtgagccagcagcagtaagagttctccactgtggtttttattatgccagatttttttatttaagttcccacctctgttttcagtctctgcctttgtgtttgtctagttttcctgcttctgtcctaagactctgccttttccccacctagttcctgctcccaggttagtaggagtctcccttactgtcagttgatgcacatgcatgcacgggcctggtgttggatataaattctacctaatgagagtgttgctcattactgccaccccagtaaggtcatatagtggttaaacctgtacatactgcacctgtgtatctcctgggatttttttttcctttgccctctttccatccctattagcatatagctagctacattctgacaggttaactgcagagtgaaagattactgacatttttttctgcatagatatttcccctcttctctgcttatatctagtatgcttgttttgtgtgatctctgggatgtgagattttccagaccccacttttctcagggactctccatcctgctcatgtctagctatctgcctactctaacaattccactttagaagtaccaaagaaactaagaaactcagtgtatggccaagaagttagagtgagacctttttgccggttaaagcataatgagaaattggataggagagaatctgacattataaataaattgagaccatttatttctagaagagaaagaggatttcatttttagaccttggtttctttttggttttctgttaaaaatttagacatccttattttgttacttgggctataatcttgggggatactgtattggtcaaataggctgcaccgtactttgagatggaaagttatcacagacaggaagaaaaaaaaagtgtttttttctgctttcactgtctcactcaccataacacttctgacaccagatgtgtggaggcctgtttccccacacgccaagcaatcctccagcagacaccagctgggtgacctctcattcaactcaattctgaccttatctgcctggagtagatctataccagttcccacaggttaagggctcagtcctacaaaactgtctccaactttagatgctagtagcaactagttggttgtcatatatacttatgaccaactggctatcaatcagaggttcctataactcctttctcaggtttggttgatttgctagaatggctcacagaactcagggaaatactttacttacatttacccattcatcataatggatattatgaaggataaaaatgaacagccaatggaaaggatttgtagagcaaagcagctgggaaggggtacagagggttcacaccctctctgggtcaccttctaggaacctccacatgcttagctattcaaaaactctctgaaccccgcccttttggattttcataaaggcttctcttgataggcaggactgaataaataattgagcattggtgttcaactcaagcttcagcccctctccgtttctggaggttggaggctgggctggaacttcaagccctctctctaatcctgccatggttggtacttctgatgaatagccccatcctgaagctatctagaggctgacagccatcagtctactcattagcatataaaagactctcttatcactctggaggttacaagggttttaggaaagaaagaagataaaatacatatatatcttattataaatcacaatatcacaaaagtagactagaatgtgagtatttggtgtgctgtattctacggctttggaaaatgtttgattaaagtatattttgtacctccttcagagacttccatgggccatagatatactgctcctctcacggtttcaaagatggtacaaaggtggggtagtgattccccaggagtaggctcaggaagtggggacggaactgcttaccttcctgtgggaacaaccatattcctatttaccatggattgtgtgttgagccgctggcttaaaagaaaataaaaaatagtgtggactgcaagtgaggtgatgattctgcctctgtccccaaacttcctcctcttctcagtgaaaaaggtgaaatttccatcctttcttcgtgcttctccttctgaaactgactttgcaaaaattgtatcagtgagaaaatcatggcagtaaaagagatctgatttaacccaccctccatcttgcctttcccttaatcattcttgggcttaggctaagctaactttgggagacatttggtttatagtttaaatgataataggccttcaccaaaactcagctggctttgtacagctaatcaggctaggaggaggagagaagcgattctgctaaggtgtagacataaacaattgccagccattcctgtggataacaccactactgtagattggccttttaagacatcctttcagggtttattgtttgttcgtttttttggcatgtctgacacccatggctccacctggacctgccaaccccactcctgtggacccactcagaagtgattcagctcaagaggtcagcttcagctccttataattttatttcagccccaaccaatcagcagcaagcacctattagagaggtgcttctattatacacccattacagaggtgcttctattacctaggtacatttcagccccaccttttcccctaaaacgcctttgaaaaacccctacctgtgagccttggatgagattaatttgagtactaactccatctcccaaaaggcatggctggcctcatgtctattcaactctttctttactgcaatgccatagtctttatttgtgcaacaggcacaaaggacacctcaggcagttagacttctgacaatcccctttgtggcttttctccccaaccctacctccacaacatacaaagagaaaagagaccctattctgataggtcagaatcccaggacactgtttgttccatggacattagtggaagtggtcactgtgttacaattctttacccttgctccctctgtctgtttgataaagagacctaggcaagacctgcctttttgggacagacctgttcagatattttctgccactctacttcctctatgcccaagcaataggaagcatgcctattagatattaaccattcttttacatataattaaaatactgcatttaccacatcaaagttaaatgtatactaggaactaattcaggttcttatttcgatttcactcatctgcttgtatatttgtataaaaacaccatggtggtttcatgacactgaatttataatgttctgatgtctggtaagacaactttcctcactaggcctctctcgcttattttattggctgttctctgccaaatgcatttattctaccaaatgaaaatataaagtagtttatttaattaaaaaaacgcctgtggggacactagttagattgcaataaatttaagcattaatttagggaaaatggacatttggtaacattaagtatcctcatccaaaacatgataagtaaaacatttactataatatctgtcatataaatgttgtattagtgctagtaattattattattatcataactatttccatatgttcagatcttgttttatatttttcagtaatattttatacattttaagatgtaggttctatccctttcttcttaaatttattcctacatatttcacagtgaatgaagtttttaaaaaatattatttctaagtatttgttgctagtgctttaagggctgttatttatacatgtatcctgtatctaattgtctaatgaccttacgttatctttttacttatagttttttaacttagacatttgaattttccagaaatataatcatgtcatctacaaaaagctacatagtttcatctcagcttcttaaatgtttctctccagaaatggtggctaggccttgaaaaggggataggatgcagttgtattctctcaatgtactcagtgtgtggcagatgagaagtctaaggtctgcctgattgtttttgctttgtgagtaacttgcactttctgtctgaagattttatttttatccttggacactatcctttatttcatttttttcttttcccaccatcgtgtctagaatatagctccctcagttaggaggttctctggttctcctaaccatttatggttctctggttatgatgccacactaaaacaaacaaatcttaactaaaaccctaaaataggcagtacattttaaagcaaataattaataaatttaagcttgtgttttgggacattctgcaatttaaagactatgtacagaatagtccttaaaagcttaacccctggaatcaaattccctgaggttatatctcagatccaggcaaactattttacctctctgaatctcaattttattgcctacaaaatgggagtaagtgttattcaacacgtgaaaatcaatcaatgtaataaaccatattaataggataaaggggaaaatacataattatctctattgatgcagaaaaggcatttggtaaaactcaacaccttttaatgataaaaaaaaaaaaagactcaacaaactaggaataaaagggaatttcctcaatcataaaagaaatctataaaaatctcacagctaacatcatacttaatggtgaatgactgaaaactctcccccagagatgaggaaaaagacaaggatatctgctttcatcacttctattcatcattgtgttggaagttctagcagggcaattaggcaggacaaataaataaaagacatcataattggaaaggaagacgcagaactctctgtttgtagataacatattctttttaaaaatttttattttaggttaaagggtatacacgttacatatgtaaattgcatgtcacagggatttggtgtacagattattttgtcacccaagtataaaaagtaaagtagaggttcctcttcaaagactttcttccccatctaattaggaataaatagtaacttctcttagaagcaaaatgtattcaaagacctgtgctaacattcttaaatatctgctagccgtaataaagaaatcaatgtactttatgctcttagttcccacagtttagcctgaatatttgccctggcatgcttatactggtccaagcaagcattaggtcgtagcccattcctcttccttatttgaaggtatttttacctttctcagcattccacaagttacttcctccttcctttgttctcctctgcctttgcctcttttaaaaagttctaagttgctagccagtcgggacaaatgcagaatgtgaggtcccattccagccaatggaaaccagacacagtggtagggtggacgtgtcaggttataaacgaccctgtctcctttgtccagtgtactttagtggcaaaactgctggcaagtgtaccctttctgcagaaagtataaaaatggccttgctgaggaaattaaatttatattcaagggctatttctttacagcaccagggaacaagcatttcaaacacaagtaataagcatcttcatcctccccccaccttccaccttcaagaagtccccggtggctgttcccaatttgcatccataggtactcaatgagtaatatattcttatttatagaaaaccctaaataacctacaaaaaatgatcaggactaacaagttcagcaaagttgcaggacacgagatcaacatacaaaaatcaactatattcctatcccctagcaatgtataacctgaaaatgaaattaagaaaatgatttcatttatataacatcaaaaataataaaatatggctgggtgcggtggctcacgcctgtaatcccagcactttgggaggcagaggcaggcggatcatgaggtcaggagatcgacaccatcttggctaacacagtgaaaccctgtctctaataaaactacaaaaaactagccaggcgtggtggcgggtgcctgtagtcccagctactcagggggctgaggcacaagaatggtgtgaacccaggaggtggagcttgcagtgagctgagatagcaccactgcactcccacctgggcgacaaagcgagactccatctcaaaaaaaaaagaatagaataattaggaataaattcaataaaggaggctcaagacttgtatactaaaaattaccaacactgttgaaagaaattaatatctaaataaatgaaaaaaatcttatactcacagagaggaagacttaatactgttaagataataatacagaaattaaaaagctaattctaaaattcaaaagaaattgcaaggtactccaagaacacacaaccagatttcaaaagttcatacaaatttacagtaatcaagacagtgtggtcctagcataaagctagaaatatagattagtaaattagaattaaaattccagaaatgaatctccacatccatggtcaattaatttttcacaaggataccaagaccattcaatagaggaagaaatagtttttttcaacaaagagcgctggggcaactggatgtctatgtgtaatctttgtataatatcatttacaaaaattaattacaaatgaaacaaagatctaaatgtaagagctaaaacaataaaactcttagaaggaaacataaatgtgaatctttgggaccttgtattagtcagggttctctagagggacagaactaataagatatatgtatatataaaagggagtttatcaaggagaattgactcacacaatcacaaggtaaagtcccacgataggccgtctgcaagttgaggagcaaggaagccagtgttggatcagtctgagtcccaaaacctcaaaagtagggaagtcaacagtgcagccttcagtctgtggccaaaggcctgagacctcctggaaaaccactggtgtaagtccaagagtccaaaagccaaataacttaaggtccaatgttcgagggcaggaagcatccagcacgggagaaagatgaagtccagaagacccagcacgtctgctcttccatcttctcctgcctgctttattctagtctcgaaggcagctgattagatggtgcccacccaaattgagggtgggtctgcctctcccagtccactgactcaaatgttaatctcctttggcaacaccctcacagacacacccaggaacaatactttgcattcttcaatccaatcaagttgacactcaatattaaccatcacagacctggatgaggcaatggtttcatttcaaaaaccaaaagcacaggtaacaaataaaaaatagactaattgaatttcatcaaattttacaatttttgtgcattaatggagactaaaagaaagtaaaaggacagctcacagaatgggagaaaatatttgcaaatcatatatctcataagcatctagtatcccgatgcaaatcagcaagagacagaaagcatattaatggttgccaggaactagaagggagaatggggagtgactgcttaatgggtgtagggtttctttaactctaaaagggctgcttttgaggggcattgcaaatattttgaaattagataatggtgataggtacgtaacattgcaaatgtactaaaagcactgaattgcaccttaaaatgatgaattttacattatgtgaattttacctcaataaagaacgtttacaattcaacaacaagacaacccagttagaaaatgggcaagggactcgtatagacatttctccaaagaagatatacaaacggcccataagtacataaaaacatgctcaacatcagtagtcattagggaaatgcaaatcaaaagatagcacttcacacccactaggtggctatgattaaaaaatggaaaataacaggtgttggcaaggctgtagagaattggagcactcagacatcgctagcttgggaatgtaaatggtatacccactgtggaaagttgtttggcagttcctcaaccagttaaacatagaattcgcatatgacccagcaactccatttctgggtatatacccaaaagaatagaaaatgtatattcaaaaaaaaccttgtacacaatgttcatagcagcattattcataatagcccaacatagaaacaacccaaatgtctatccactgatgaatgaataaacaaaacatgggataataatgctccattaaatagaacgttacttacccaaaaaaggaattaagtcatgatacatgctccaacatgaccagacaaaccttgacaacattatactactaagtgaaagaagtcagacacaaaaggccacatacggtacaattccactgacatgaactatcaagaattggcaaatcagtaagagacagaaagcaaattaatggttgccaggaattagaagggagaatggggtgttactgcttttgcaggatgatgcaaatgttttgaaattagatagtggtgataggtgcacaacattgtgagtgtactaaaagcactgaattatacactttaaaatggtgaattttacattgtgtgagttttacctcaatttaagaaaatgggacaataccatatgtttttcaaggttttgtgaaaatgatgagttaatatacataaaagtacttagaggactgcatggcacatatgaagtgctaaataaatcttggcttattattgcttgtagtactaagagagggaagatgaaagtgtcaagaggatattaaggggaaccagcagagaaactgggacgccagcttcctcagggatgctccctcactcagtttgtgtcctcatgagtttgtctaaatgatcacagtccagatctctcaaagccttcttttaattcttctggaaacgtctttcttccaaagccactactcagcttgttcagttagtaggcacaaacagaatcttcacctgggtcctcactcttgctgggtttgagaaatgactgccccctcaagaacatcaagcttatttttctcattctgggtttctttgtttcctgcagttatgcctcatggagcatgggtggcttgcttttcctgggcacatatagtgcttgatagtatagattttgttcatatgacaagttcttctgtatccgtcagggtttcagctggtaagcagaactatggtgaattatgggagaggaatttgaccttgcacaattgtagggaattggcaaagcgaaggtccaggagggaggggatgagaaccaaagaagaactcaccatccatttaatatgagaacccaaacacattcaggcaccaaggtggggccgcaaatggaaagctcaagtggaattccgtgggaagctgcctctgtagcttctgctctaggggcctacctccaagcatttgctgatgaactcaaggctgttgctggtccacaggctcaggagtcaaggagaagagctggatgcagagggaagagagcaagaacatgctggagccttggtggccttcacaagtcacacttccattcttccctccaaatttcttgaaaatgtctcttttgtccaactctaatgtggaaccatacaggttagggggacattgagaaaacataatttcagctttgccaagtgtgcatggtacaaaccatgacacattcctaatctccataggggaagttagacaaatgagatcttaatttgcataggaaaaaaacagcatcaagtgtccagatgtggtttccaataaatatttaaaagaatcggctgggcatggtggctcacacctgtaatcccagcactttgcgaggccgaggcaggcggattgcaaggtcaggagttcgaggccagcttgaccaacatagtgaaacctggtctctactaataatacacaaattagttgggtgtggtggtgcacgcctgtaatcccacctactcaggaggctgaggcaggagaatcacttgaatccaggaggcggaggttgcagtgagccaagatcccaccactgcactccagcgtggtaacagaatgagactccatgtcaaaaaaaaaaaaaaggaatcccatatgccttcattgtacaattcttttgattggggaatcattataagaattttaaaagggagaatgtattgatttaaaaatatttaaagagatattgttcatatgagccctttactctttccctttgatggccatattgagtaacagatctgtttgtctgttcacaggctgcagaggtgtctgcatccaggtggtatctcagaccaagtgaatacagggagagtgacttaacagggggagagagaagcatgatgtattagttgtctattgctgcataacaaatgactccaaaacttaatggcttaaaacaacaaagtttcattatctcgttgttcctatgggtcaagaatctgaacctgtcttatctgggtgcctcagactcaggaactcctaccaggctgaatcaaggggttggctggagctatagtcatctcaggatttggctgggggagaatccacatccaaactcacacggctttagcaggctttgggttcttgctggtcattggccagagaccttgttttcttgccattgggttactcataatatggcatctggctttcttcagtgggggacttggggagggagtatagagaggaagagggaaggagagagagagaaaaaagagagaaagatagagaatacgctttttaaaaaaacctaatctcagaagtaacatccatcatttttgccttattctgtttgttagaagggagtcactgagtccagcccacattctgtaagaggagataacacaaagatgtgagcactaggaggtaaggtcatggaggggggcatcttagaggctgcgtgccacacatatggggcttgaaaggctttgcagagttttgacttcatctaaaaagcagtggaaaaaccattaagcagtgttgtaagatatgtatgtcttcaaagaaactgactttgttttcactggacaagatcaacataatgtttctaaatttttcttattttcttgatattttgcaattttgattttgttcctctctttggccaaagaattaagagaaagtttaaaaattttcagatagcgcagcatttttgttgttgctgtttttcacttcattgttatttcatacttttaatgctttgtgttcagaaaaaatgctctatgttatttctactctttgaaatgttccaaaaatctttgaaaagactttttatttcttttactctgatatattcttatatattatgtgagacttgtttgttgtgtggcttgggactacatggtgtcattctacttcatctatcaagcccctaagaaagatgtatttgaatcttcaaacgggaatgagtttctgtttctccagaagggtaatttttttttttttttttttgagatggagtcttgctgtgtcacgaggctggagtgcagtggcatgatctcggctcactgcaacctccgcctccggattcaagcgattctcctgcctcagccttccaagtagctgggactataggcacgtgcccccacgccctgctaatttttgtatttttagtagagacggggtttcaccatgttggccaggatggtctccatctcttgacctcgtgatccacccacttcagcctcccaaaatactgggattacaggcatgagccactgagcctggtccccgaagggtaaattttattaaccaaacactgattcatttttatttactgtgtagtaacttgtggggaatgtttattatgttataaactatatcctttattattttaaagaacccttccttgtccaacataatgatttttcacttttctggtttacacttgtttgttgtatcattgaccacccctcgattttcagttctttaggttattttgttttaaatgtctccctcaggttttgatttttggtacagcctgctgatatttaagggaataaaagattttaaaaggtgagttggtctgacgtaagttaattgatgagacaacttattttattcttatcatcttgtttttctatttttttctattctgaatgctactttaaaaaaaacttatactctacagtatttgttccctttgtttattaactattcttttcttctgataccttgaaaagttatgaagactttttgttcttgctgtggttattttatttattttcttgaatttcacctttaaatagtgtccaacgttccccttatgtgagatgagaatcttgatatatatcttagttcaggctgaaataatgaatgaccacagactgggtgtttcacagacaacataaaatttatttctcacagtgctggaggctgaaaattagagatcagggtgctagcactgccgggtgctgatgagaggtctcttataggtgcagactgctgactctttaatgtatcctcacatggcagaaagaggggaagggagttttgggggtctcttttataaggacactaattccattcacaaagccttcacctttatgatataataatctcccaaaaatcatgccttctatactatcaccttgtgggtttggatttcaacatgtgcatttagggatggcgagatacaaacatttcatctataatagtatactcttcctgtcttctatctctctctctaccctgatacttccatcactgattaatttggttacactattttccattgtttctcttgggattaaccttataaatggaatcatacttacagttctattattttatgtatcacctctatgtactgtttttttgacagccctccctaccctgttatgaacgacaaggaggtcagcccacatatgtgatcccccactttctttccacatcccaattcatgagtttcgtgaattacattattatgtattatcaaggtaagcataagtttatatttcccaaaactatttagctttagttttgcattgtatgttgatgcatgaaatcaatggttttcctttgagactgcatcatgatgaactgtactttttctttccattttattgtttgttttagaaaatgctctaaaaccttttgtagtagttgttctcaaactgttataaagatactaccagagactgggtaatttataaagaaattgactcacagttcggcatggctgggaaggcctcaggaaacttacaatcatggtggaaggggaaacaagcacgtcttacatggtggcaggtgagtgaagtaaagtgtgagcacaggaaaaactgccactttaaaaatcatcagatctcatgagactcactcaccatcacaagaacagcatgggggaaaccgcccccataatccaatcacctcccaccagattcctcccttgacacgtggggattacaattcaagatgagattttggtggggacacagagccaaaccatatcagctttacacccagaaatcttgaagatttgcacatacagatggtctgcttttttgactttatgatggtgtgaaagcgatatgcattcagtagaaacagtagttcaagtccccatataaccattctgtttttcacttttattacagtattcaataaattacatgagatagtcaacactttattttaaaatacgttttgtgttagatgattttgcccaactgtaggctaatgtaagtgttctgagcacatttaaggtaggctaggataagctatgatatttggtatgtgtgtcagtctattttgtgttgctataaaggaatgcctgagactgcataatttataaagaaaagagatacatttggctcaaagttctgcaggctgtacaagaagcatggcactatcatctgcttctggtgaagcctcaggaagcttacaataatggaggatggctaagggcaggggcaggcatttcacaaggtgagacagggagcacaagagagaggaggagacaccaggctttattatttgtttttaattaaacaatcagacctcatggtaactaatagagcaagaattcactaattaccatggggagggcaccaagcctttcatgaggatccacctccatgacctaaacaccttccgctaggctccacctccaacactcaggatcacatttcaacatgagactcagagaggacaaacatccaaactataccagtaggtaaggtgtattaaaatgtattttccatttaggatattttcaacttatgataggtttattgggatgtaacctcatcataagtcaagaatcatatgtatttccatggcctttatatctgaatttcaattactccccacctccctgctaccaccgtgagaactttgtagacattgtttcatagttttgtagtttgagtgttgctgtagataagttttagcataagcctaattttaatttcttccttgtatatgatttccttgcacaggtgtggctgtgtatgagccaacccctaaggtgtcccagaatggtctctttgttgcagaattcatgcctttgtgaaatcccctccccctgggggtggtccatacctgatgatttgcttctaacaaatgagataaggcaaaaatgatggagtatcacctccagtattagcttacagaaagactgtgattacatcttgctcttcctctctcactctctaactgactcatgccaagtagggttgccagatttagcaaataaaaatacaggatgcccaggtaaatgtgaatttcagataagcaatgaataatcttttagtataagtatgtcttgtgcaatatttgggacatacttatacaaaaaagttatttttttatctgaaatttgaataattggacatcctgtattttatctggcacccctagctcacagagaagccagctgtcatattgtgagttgctttatggaagtgtcatgtggcaaggatctgaggacagcctccagccagcagccagaaaaaaaacccgaagctctgaattcaacagctcttgaggaattgaatcttgccaacaaccacatgcgtgagcttggaaatggatcctcccctatcaagacctgacatgactgtagctgctgtagacatcatggttgctgcttcacgagagaccctgagctagaggccccagctaagccacatttagatacctgatttaccaaaaccatgggataatatatttttctttttataagccaccaagttttgggataatttgttgtgcatcagtagataactaacacaaggtgtctggtgaagttttcttaatcaaaactcttccttgaactcctctaacataattagaatactttttactgttggtatttttgtctccaaggcaggaatctatagatccaccagagattttgcatctttcttcaaatagtttttctgatctatcatttttgtctatttcttttaaactctatacttttcaaattaatttttttttttgaattggagtttcactcttgtcacccaggctggagtgaaagggtgtcatcttggctcactgcaactttgcctcccgggttcaagtgattctcctgcctcagcctcctgagtagctgggattacaggtgcccaccaccacgcccagcgaatttttgtattttttttttttttttttttttagtagagatggggttttgccatgttggccaggctggtctcgaactcctgacctcaggtgatccacttaccttggcctcccaaagtgctgggattacaggaatgagccaccacccccggcctcaaattaattttgctccattttctgagtcccatttgcatattcctcacgagtttttgcattatctagttttcttttgactgcctctggtgttatcttcatttctgaaattgtttaatttttcttttccatttatttcttgagatttgtcagtacactcgttgtccccttctattgttctgtcatttctttcttatgctcttatatctcttctttgagcttttatttcaggttgaattttgtatctttcatttcatatagaactctggtcataatttgtatttactttgttttataatatttctgaggtgtgtcctttgttagctttccttcctcttctccctctccgttcacattagtttgtttattttcttcatgattatggctctccttggaatgttccctggatgagttcattataacagtaagagtgaggggttacaggatggatttgggatagtgaacaaagtggagtttgattctactgtctctaagcgtttttacacaagcattttctccttctatggttttgcagaacatctacctggtcacagggaagcttcacatgtcacagctgtttttggtgggagtgattttagtcttggattttccctagcagatcagagtagcatgcttcctgtgggctttcatcctcttggtttttcctccatgatggcctactttttataaaagtgtcgggtccacataatctcacactcagccctactgcctcactatttcatggtgccaactgtcaggagaactcccctagctgacaatggacctcagttacctttctaaagtgagagtccaggctgggcatggtggcttacgcctataatcccaggactttggtaggccaaggtgggcagataccttgaagtcaggagttcgagaccagcctggccaaagtggtgaaaccctccatctctactaaaaatacaaaaattagctgggggtggtggtgcatgcctgtcatcccagctacttgggaggctaaggcaggagaattgcttcagccccagaggcgaaggctgcagtgagctgacatagtgccattgcactccagcctgggtgacagagtgacactctgtctcaaaaaaaaatagatacataaaataaaataaaataagataaaataaaataaaaagtgagagtccaaggtactatcttcctgaatattctgtgctctgtctatttcatcccaaaacctgagggacatgagttctcttgcagcatcttccctcacccttgttcaattgtaactgtctgcattagttgtgcctcatcaattgtggtttaaagtttcaaatatgtcttagtttcaccaaatatggaattttcctttctgtttctccttctctttgttgttttcaggtagcttcaaagagaaaagaggagcagagattctcttctgattacagaaaaaagcgtacttaggaaaaatttaaactattcaaaaatacagagagaggaaagttaaaacacacaataaacctatttatgccagaaatatcccctattgctagaggagatcagcattattgcctgcctggatagcatgcaaaggggactcctaagaaacatgccttaaaaaagtaaacttgggctgggcgcggtggctcacgcctataatcccagcactttgggagtctgaggcgggtggatcacgaggtcaggagatcaagaccttcctggctaacacgtgaaaccccgtctctactaaacacacacacacacacacacacacacacacacacacacacacacacacacacacacacacaaaaaaaaaaattagccgggcgtggtgacgggcgcctgtagtcccagctactcgggaggctgaggcaggagaatggcatgaacccgggaggcggagcttgcagtgagccgaggtcacgccgctgcactccagcctggactacacagcgagactccgtctcaaaaaataaaaaaaaaacacgtaaacttgtcctcaagacctgcctctgctttctctcattgtttcaagcaaataataggggtgaagattcaggatggctcaatcggggaagtgttattcctcctttgagaagaaagggattattttccaaaagaactgtaaggcatggctaatgtactgaaaagatttgagagaatatagctgggctctggaaggtgttggaccaaagaagctgaaatataaggctgagtagtgtaaagcatatttatacaggcatactctccaatgactatagatttaacatcctggcaaggataccaaaagctgggcaaaatatgttggaaaggcttctttttgaaggttggaaacagcaatgttttacagaaaataaaacagagatggtggaattgccctggcagttttgaggaaagtgccaataggctcagatgtaggcatgttaaaatagatttttatgtaagacaagacaacttgccagttgactctgttccctagaagggctctgatatagtttgggttttgtcccctccaaatctcatgttgaaatgtgatccccaatgttggaggtggggcctggtggaaagtgtttgggtcaagggagttaatccctcatgagtgtcttggtgctgtcctcatggtaatgagtgagttctcactctgttagctcacatgaaagctggttgtttaaaaagcctggcatcaatgactgggcgctgtggcacacgcctgtaatcccagcactttgggagaccaatcacgaggtcaggagtttgagaccagcctagccaacatggcaaaaccccgtctctactaaaaatacaaaaattagccaggcgtggttgcaggcatctgtaatcccagctacttgggaggctgaggcaggagaatcgcttgaacccggcaggcaaagcttgcagtgagccaagattgcgccacagcactccagcctgggtgacaagaacaagactccgtcaaaaaaaaaaaaaaaaaagcctggcatctcctcccctctcactctttctcttcccgtgtgacatgcctgctccccctttgcctttcgccatgagtgaaattgtcctgaggcctcaccagaagctgagaagatgctggtgccatgcttgttcaccctgcggaactgtgagccaaataaaccccttttctttatgaattacccagtctcagatactccttcatagcaacacaaggtgaactaatacagacccaaaggaaagtaccttcactaaagaaataaatgtgctagtgaaggggaccctagccttgttgagctcagtggcagcttcctctgtagtccagagttgatggctagagatgctgctatgatggtaagatccctagtatcaatggaaatgatagaattccatccagaatagcaggtgcaaggtggtggctcttaatcaacaggggcaaggtagatttaattatccattatccattaattatttaatgaacaccaacagtgggattgcaagtgggaggtttagaacaacaggactctatggcaaagactactagaccatggtatcactaggggcaactagctggggaggcaacaggggtattacttggcttataaaaccaaaatagaccaggagcagattatcagaatgctggtgttggctgccaagtggaatataataatcacacatctggttttccaaactgaaccgttctcagatccagaatcgtgtgattgatagagatgctggatccttttgcagaaaatcttataatgcctcaataaatttatagtagtaatttccccaatccttctccaaaagaatctatactgcagaaaataaaatacctgtacagtgtgcattacactatgcactacagagatgaaagtagccaaatatttcaagtgctgttgaatccagagtttgagatgatgctaataccagagaaaccagaacaccatcatgatgccctggttagggtgggtatgcgaaaaccaggtgataaatagagtcttggcccacgttgatattatgaatgtccaatgagtctgccaactcacactgtgataatttcatggtctctgagtgcttaattagtttggatgcacctaacagctggaagacccctcaccagacccctggcttctgacctgcatagtgagagccattacagtacaaaaggccaagtggaagcccctgaaactgctcattatcccaatcaagatggtaaattagaaggaataactcatcctagctgaaatggcagaagctagggacactttcagagacttaaagtttgcagaggtagtggtttttatatctcatttcattcattggtatgggacttgcaaaaaccaaatggatcgtagaggatggtggttgtcatagatcattttctgcttcttgtaataaaatacctaaaatttggtaatttataaagaaaatgaacttatttctcacagttatagaggatgagaagtccaaggtcaagtgtccacattagatgagaaccttcttgctcatgggggctctccggcattccaagaccgcagagtctcacatggcgagggggctgagcatgccaccatgctacctcacatatctcttttcttataaggccaccggttcccctcctttgataacccattaatccataagtagattattaatgagagctgaatcttaatgatccaatcacctcttgaaggttcttcctctcaatactaccacattgaaaattaaatttcaataataaaataaaaaaataaaaaaataaaatttcaacagcgttttggaggggacaaatatcctaaccatagcattctgccccctggctccacaaaattcacatctttctcacatacaaatatatttatcccctccccaaataagtttaagctccaaatctttactcatttcagcagcaactcaaaaatcccgagtccaaaatctcatctatgagcctgtgaaatcaacacaaatgatctgcttacaagcacagggcacacatttcctttccaaaagtgagaaataggcaagaataaaggggtaaaggggtaacaggcaccaaggaagttcaaaaatgaagagagcaggcattgggtcttaagagtctagagtagactatttgactctacatctagaattagctatacgctgatgtgcagctggggactaagaccttggacaactctacctctatggcttggctgggctcagctcttccttccaggggagcattgcacactggcagctctgtagttctgtggtcttgatggttgtcctattctcacagctccagtaggcatttccctagtgggaactctgcagcaataccaacttcacatttctgcatagcattgctctagtgggggctttctgcagtggctccacccctgtaacaaatctctgtctgggcctccattagtgacatcctttgaaatacgtgtggaggctgccaagcctccacaactcttcctttctgcaagcccgcagaattagcaccacgtggatgctgccaaggtttacaacttgtacctttggagcagtgagttgactcatatcttgggctgattgagccacagctgcggtggccaaggagccctatgctagaatgcagaaagcagagacctcaagggtccctggctaacagcccatgaaaggcattctgggtctgttccctgaaagtactctgccctctcgggtctctgggcctctgatgggggcagcctcaaagatctctgaaatgcctttggggtctttcattttcttgatggtcccttctctctgtactaatctctttagcaaaaggttgctgggtcacaccttcagtttcctatcttgaacatgctttttttacttttcacacaaccaggctgagagttttccaaatctttctgctatgcttcctttttgattataaattttctttttaaattattccttttttccctaatctctgtgtaagtggccaaaagtaaccatgcagctcctaccataatttactttaaaatttcttctgtaataccctagttcatcactatcaagttcagccttccacaaagcccttgggtgtgaacagttcaggcaacttttttttcccttatttataacaaaaatggtctttccaataccttgcacctcagtttcatcaaaaccttatcaaaatgtcctttaccattcacatttctgtcagcattctggtcatgactacttaactgatctccagggagttccaagcttcccctagagtttttgtcctctaagtcctcacaagaatctaggctttttaaggtcttgtcctccaaattcttccaacctctgcctattagttcctacccagttccaaagctgtttccatattttcaagcattcattatcagcaacaccccactccaggtacaaatttttgatcttagtctgttttctcttgtttataagggaatatctgaaacagggtaatttataaagtgaagcgatttatttcttatagttatggagactgagaagtccaaagtcaaaggcttttatctactaagaactttctttctcatgaggaatgtctacagtagagtccaaacacaatgtagagtatcacatgcaaaggggcttagtgtgctaacatgctagttcagatcactcttcctctctttataaagctatcagttaccctcctatgataacccattaatctattaatctatgagtggattagtccattaatccacatgagggacaagctctcatgatccagtcacctcataaaggtcccacctctcaatattgccacactggggattaaatttcagcatgagtcttggaggggacaaatatgcaaattgtagcagtagtaaaccactgtgaatctaaccaaacagtggacccatctgcagctgcttttttagtgttcctgtatctttgctggaacagatcaatgcaggcttatgctcttgtgcagctattgatatgacagatgcctttttcaatatccatcaaaaaagagaataaaaagcagtttgcattcaccacaaatatacattcatagtctcatcacagggctatgataactctcatttcctctgacacaacatagtccaaagggactttgtctcaaaatttcataaaacattatagtggtacactatattgatcatatcataaaaatcagaaatgataagcaggtagtatatagtactttggatatcctagtaaaataaaaatgtaccagtgggtagaacataaatcttacaaagaataagggacctgccacgttggtaatcattatagagactcagtgatctcaactgcgctacccaatgtgtgtgtgatccattggcaacactttggagatcattaggaatgaaaattctcaggcttccttccagttctactgaaccaaagtctctggaggagatgctgaggaatctgaatttaacaagcccctcagatgattcctttgccgctaaggtttgtgttttaattggggccaagagaaagaaaggttcagactgtgttacattcagccttgccacatggacgctatcatggagcagatcttacaatgctgaaagtatccatggtagataaggtgccacgtggaatacctgacaagctctgataggagacttgcagtgcagagcctgacggttctggagtaaggtcatgatatatacagcagagaaccatttacatttcaaaacaaaaaacattcctacctgctttggggaccaaggagagacagagcacctgttcatgtgacattaaatgacttttaaactgtagctgtagctgcccattataacctgggtattgtcagacctatccatcataaattcatgtattgtattagtttatttactgtgccataacaaattaccaaaaatttcatggattaaagcagcaccaatttagcatcttacagttaaacaggttaaaagtctgatgtgttgggaggccgaggcgggcgatcacgaggacatcgagaccatcctggctaacacggtgaaaccctatctctagtaaaaatacaaaaaattggccgggcgtggtggcgggtgcctgtagtcccagctacttgggaggctgaggcaggagaatggcgtgaacccaggaggtggagcttgcagtgaaccgagatcgcaccactgcactccagcttgggcaacagagcgagactccaactcaaaaaaaaaaaaagtttgatgtggatttcaatggtctaaaaccaagagttaggaaggctgcatttcttctggaggacctagggaagactttttattttttcttttttaaccttttccagtttctagaagcgtttctattctttagctcatggacactgtcctctgtcttcaaagtcagcagtgttgcatctctgaccattcttccttaatcacagctccctctgacctcctcttctgtctccctcttccacttttagaaacctttatgattatatggggcccacccagataatccaggataaactctttactttatagtcagatgatcagcaacattaactccctctgcaatttttcttcccctttcccatggatcctaacatatccgcaggttctggagatcaggatgtacacatctttgggggcccattattctgtttaccacaagtgaacatgagagtgatttgtgatggaaatggaatatttggaatggttcttaagaaggtccaggaagtataaattacataagcaggtagcccagattcccaagttacccaccccttttgtgttgatgtatgtctttgttcatttggtttgctataacagaataccatagactgggtggtttataaacaataaacatttatttctcacagatctggttgctggaaagtccaggatcaaggtgccagcagatgtggtgtctggtgaaggtccacttcctgctttatagacagcaccttcttgctgtttcttcacacgggagaggaagaaagaaagctctctggggcctctttgataagggcactaatcctatttatgagggctctgccatcatgacctattcacctcccaaagaccccacttccaaataccatcacactggggattaggtttcaacatatgaatttgagggaggggggcacaaatgttcagtctgtagcaatgtatttccatcaactcacaagtgcagcttcatggtgaggtccctataactagctgtcagaagaggaaacaaacccaggcttgattcatcaaaggattggctcaacatgttggcataggcagaaaagagagtgctaccacattataacccaacagaggggtggctccagaataatgtgatgagtaaaagcctcttgggtagcgcttacagcattgcaccaaaccatcaactttgtgtggcaagagaagtggctgatctgaaatatacagattccttggtggtagaaaatgccttggctgattgtcaggggctagacttgaaaaatatatacaagaagtcagggaaagagaaggggcatatggatggtcacatgggagtggacacaaagcatgttagtcctgtgtctcatgtcactgacaactagaaagcacctgccaccaacaagcacctggcactgaaacaccaagtgaatgggatgacgtgtggatttcagccagccttgatcctccatcacccagtgcctacaaaataagcccagcagacataaagaagggtattcatggaccccacagcacaggcttctgatcaccaaggctgaactagctaccactgctgctgagtattctggcttgagagcagcagaacccagcactgagcctgggtttttggaccaactaccagtagatgtcaagttgattaatcagaccattctttcctgaagagggcaattattcattttaattaggattgctacatattctgggtatggatttgcctttctgtccacaatgcttctgcaagcaccactatccactggctcctagaatgtctgattttccaacatggtatcctgaataagaaaacctaggggccaaaagccacttttgggcaaaggagttgtgacaatgggctctactggtttcatcatatgctgcttcatccacaagtggctgatctagtagaatattgggatgacctcttaaagttaagctaaggcaccagtttatgaataatacaccaaaaatgcttcaagaggtaatatacacttgggtccagaattcaagaggtgaaagaaggattggatttctcaacactactgcaggaacccagctagataaattgtacttcctgtccccacaattttaggctcttctaggctacagatactggctactagtgtggaggggatagttacaccaggagacatcgtaagtgttccactgaacttaaagctgtggctgatatctgtctctttggggctcttcaagtcggattatcaaacaatcaaagggattcctgtattggcagggataattgatcacgattattatgaggagatagacagcaggaggaattgtttggggcccggatgattcactggggtacctctgggtgcttttatgcctggtgatggtcatgaactgggcaattataacaaccaagaaagcttttcaagggtccagtaaatcaggacctcagacccttcaggcatgaggtgctggctgaggctgaagacgctacctcttatccagaataaaacatagaggaaggagatgctggatcaggaccaatcacagcagcagagggtatagtctgttccaccaatcctttcattgtaagtcctttttttaaaaattgtgatgacaacttccttgatgaagcagtgccaagacagaatgaatatgggatctgagcggtgtcaggagtgaactctagcagaggctgtgttttctgctcatgtcctcttggcactgacctttccaacagcgtcctacagcaagcactggtaactctccacctatgagctatctcttaatctacttagtgcacaaaggtgtatgggagtttccacttccaggagcagccctcagccaatgacagatgagtgctggatacatacccttgctttcttgttctcacgtgggataattctgaggcatgattcataccttctctcagatgtccctaatggggctgagtcctgggtgcccacggagatatcctgctcattagtgtgcgctgtatcactttctccaactcctgtctcacatccttccctaccagtgcttccagggaccacttgccaaataagccacaggtattcaaggccttgtcacaagatctgattctgggaaaatctaacctaagattcacatctcttaagcactgccttgggggacccatgattactaaaagtaatattcatctcaaaattacttaacatttaaaatatatatacatattcattcaatgtccaagtagaacagaattatttttttctcatagtgtgtcagacagagagtagactgtgcactgttgtgtgtttcactaataagtgctgaaaggagatactgacttttctcaggttgaatgttgttccacttgatctctctttctgccactgtttcaagttacagtaaatagctttgacccacagtggcttacaaaaggcacaaaagaaagcctgctccaaaagtgccaggaaaagaagcatagtataggttttatgcaaatgccaaggtggctccagtttccttgaaggaaattaagaaggaatcagagtggtataaaatttagcaagaaataagaggctggtagtcatgctttgacatgatgaaggtattatatgcatagttgtggaatataggaacctacagccagagccatgtcttgactttggggaatgtaaagggaaaagaaaagactttgcaacagactgactattaggagcacatttcataggagcctatgctatagtaatccccccaaatgaggttccattccaagaaatagaccgcctgcattcaatggaataaatgtgtgtgtgtgtgtgagtgtgtgtgtgtgtaagtatccattcagacagaaagtgttctatatctgtatgtgctgacatggaatgaggtataacataagtgttcatatgtctatttattagaagcaaattttgtttaaaaataacctttttacagaaaaaatagtgttcagtggaatatgctgggtccaagctcttagtaataaacataagagaactactagcttgtgcattcaacctcctttataattctgccacccttacaacaaagttttgggccatatcgtcagcacaggttgcttgtaggagatgagggtctctttcaatgctaccatggatactttctgacattcttaccatgccctgaattcatcactggttgacctgcatcagttattttattgtatatcagtaaacaacatccagctctacaacctttaaaatttttttttaattttactattattatactttaagttttagggtacatgtgcacaacgtgcaggtttgttacatatgtatacatgtgccatgttggtgtgctgcacccactgactcgtcatttacattaggtatatctcctaatgctatccctcctccgtcccccaccccacaacaggccccagtgtgtgatgttccccttcctgtgtccatatgttctcattgttcaattcccacctatgagtgagaacatgcagtgtttggttttttgtccttgcgatagtttgctgagaatgatggtttccagcttcatccatgtccctacaaaggacatgaactcatcattttttatggctgcatagtattccatggtgtatatgtgccacattttcttaatccagtctatcattgttggacattttgggttggttccaagtctttgctattgtgaatagtgccacagtaaacatacatgtgcatgtgtctttatagcagcatgacttataatcctttgggtatatacccagtaatgggatggcactcatgggtaggaagaatcaatatcatgaaaatggccatactgcccaaggtaatttatagattcaatgccatccccatcaagctaccaatgactttcttcacagaattggaaaaaaccactttaaagttcatatggaacaaaaaagagcccgcattgccaagtcaatcctaagccaaaagaacaaagccagaggcatcacgctacctgacttcaaactatactacaaggctacagtaaccaaaacagcatggtactggtaccaaaacagagatatagaccaatggaacagaacagagccctcagaaataatgccgcgtatctacaactatctgatctttgacaaacctgagaaaaacaagcaatggggaaaggattccctatttaataaatggtgctgggaaaactggctagccatacgtagaaagctgaaactggatcccttccttacaccttatacaaaaattaattcaagatggattaaagacttaaatgttagacctaaaaccataaaaaccctagaagaaaacctaggcaataccattcaggacatagacatgggcaaggacttcatgtctaaaacaccaaaagcaatggcaacaaaagccaaaattgacaaatgggatctaattaaactaaagagcttctgcacagcaaaaaactaccatcagagtgaccaggcaacctacagaatgggagaaaatttttgcaacctactcatctgacaaagggctaataaccagaatctgcaatgaactcaaacaaatttacaagaaaaaaacaaccccatcaaaaattgggcgaaagatatgaacagacacttctcaaaagaagacatttatgcagctaaaaaacacatgaaaaaatgctcatcatcactggccatcagagaaatgcaaatcaaaaccacaatgagataccatctcacaccagttagaatggcgatcattaaaaattcaggaaacaacaggtgctggagaggatgtggagaaataggaacacttttacactgttggtaggactgtaaactagttcaaccattgtgaaagtcagtgtggcgattcctcagggatctagaattagaaataccatttgacctaacctttacaattatggctgtgcccatatctttcacttattagatctactgcataagcatgtgcaccctcttctgcctattgttcaatccaaataaaccacaggggagaatcttagtaaatgtgattccacagtgtgataacccctccacttaatgccagaaatagaaacaagttccttgttgtcatctgggtggggagggatctaatttcagaaacccatcctaagagtctacttcataatatcacttctttttatcaactgtcatgggctgagttgcccccagatcttgagctgagagtcacagttatttgcaaggaggatgccactggcatatacccaactggtgagtgcccaggtggaatgggtgggcaatagtatgcatatactacaatttcattgactatccaccattggtctttatttcccacttttcacatttgtaaaaaattctgcaaaaattaactgcatatgcatatctttgcacactttgtgcatattcttcactgtttttttaatttgaggtataattgctatacaaaaaaaaacactaacaaacatgattaaatggatttgggcatatggctacacctgtgataccatcaccacagtcatggtaatgaacatgtcaaaaagtttcccaaagatttcttgtgccctttgtgtgtgtgtgtatatgtgtgtgtgtgtgtgtgtgtgtgtgtattaagaacactgaacatgaagtctaccgtaacaaattttaaagtgtacaatatcatattgttaaccataagcactgtgttgtgcagcagatgtctagaacttattcatcttgtataactgaaactttttacccattgagcaacaactccccattttcccctcctcccagcccctggcaaccaccattctattttctgctcctctaagtttgactattttagataccttatataagtggaatattttacagaatagattcttaaaagtggaaggttagcttgaaggactacacataattttagatctggcagtatggtcaaatcaacctccaaaattatatatttttacactccttgtgtatgaggattcttctatcatcaccaacgctgggcataagttgggctcacagggtggacatttggttaaaagagtctgtgtttcaggagagaaagctgggctggaggcagagatctaatagctgtcagaatatagatgtcaattaaagtcatagaagcacctgagctcactcaggaaaaaaatatgtaaattgagaattcaaccgtgcagagaatgaaagaaaggaactcttagggacgttaacatttaaggtatggatgcaggtgaggagaaaataaaatgatgaatgtcagagaggcggtcaaggagaatgctgtgtccaagaagccaagggaagaaggtgttttaagaaggagaatgcaatgaaatgctggtgagagtggagcacccagtggatttagccacacggagagcaatggcaaccttggtgaaatcagtgcggtaaagtggtagagaaggaggggataccactgtggaatgagtgtaaaggaagggagtaaaagtggtgaggaccaagagctttccatgatgtttgtgagccaagtggaggagaaagtcagggtggtagtcagggaggatgttgagtcaatgaaaggcttttctgggagaagtggatggaaaggagtttccaaaagtagtatattctgcatgttatccttcaaatacaaaataagggcatatatcatgtaatgtttaaattacgatgactcctgccccacaccaccacactcctgtttctgcacagagatcaggaaatccagcccttcttctagagttcccctcctgtcttagtccttttggactgtagactgggtggatcataaacaacagaaatttatttctcacagctctggagactgggaagtccaagatgaaggtcgtggcagatctggtctgatgaggacccacttcctagttcatggatggcctactctgtgtccacacatgatggaaagggcaaaggacatctcttggtttctttgataagggcactaatccctttcatgagaacaccaccctcatgacctaatcatctccctaagaccccactttcaaataccattacttgggggttagggttttcacatgtgaattttggggcaacacaaacatccagaccataatgcctccctaagccttcctatagacagccagggatttttccgttggtcctgtttcctctacagaaattctcatgcaccgctttgtaattcaacactgtccctgaaaccatgagtgtgggatgcaagtcttcattcacgcaagctgtcggtacggtgatagtgtctgttctgcagaggattcctcaccccacagagattcctcatatcaggagaatccttcctttgtgatctgtcctctgatcactgctccaggccaaagttaggttcacaaaatcaaactcctccagacctgatatttccatacatttattcaacaaacaaatgttgagtgcctactgtgtgcacaactatttccttgagtttgcccagtgtcaaggttgcttaggtcaggagaggttctagcaccaggccacctgtacagcaggtccttgaatcatgtcatttcatttaactttgttttgttataataaaaacaattgcttcctaaccagagccactgcctgtgtggcatctgacgttccttccatgtcctcgtgggttttctgtggataatctggcttcttcccacatcccagagatgggcacattgggtgaattggtgtgtccttattgctccagtgtgagggtgtgtgtgtgagtgtgtgagtgtgtcctgtgacgggatggtgtcctgtccaggtatcagttccccaccttataccctgagctgactggacaggctctggccacctgagcccctgaactggaataattgggtgagtaattacgttatttgtttttattaatctttcttaagtatatgtgtagctcacatttgtttccatgttcaaatttcaagtgttttggtctttatttagaagtttggtgatgtttgatgaccagaaatatgccataggaatttttgtttgtatggatcagtctatggtaaaattggtttcattatacatcgtttcacttcaagccacagtttccaagaacctgtcaatgatgttaagcgagcacttactgaatccagatattcatgttcccagaatcagcctgcatgtgcagtctgggtcaccagccctggctttcagcacacctgatcacgcactcacgggtcttgtgctatctgtggatgctttcatgccacgagagcaaagtagagtagtcatttctaacccagactgtttatattagtctgctctcatactgctaataaagacatgcccaagactgggtactttataaaggaaagaggtttaatggactcacagttccacatggctggggaggcctcacaatcatggcagaaggcaaaggaggagcaaagtcatgtcttacatgacagcaggcaagagaggttgtgcaggggaactcccatttataaaacaccagatcttgtgagacttattcactacgacgaaaacagtattacaattcaaggtgaaatttgggtggggacacagccaaaccaaatcaccgtctgacatgtttcaacaactttgaacctccatgagaaggtttggggttgatgctcatcacttctctcccagaaaagaccttttccttcaagggcaaaatgtacccaacctaaagccagatctcaggtcctaattcagtcaaagtgcatgtgtacactgatccttcatctaccctgtgtagcataggtgaatataagtttggtttttgtgcaactaaacctcattttgatggttttagcaaagcaaggacatcatctgagtaagaagttgtctttcctacacctgtttggaaggtccattcccacattatgtctggttcttatgatgggtccagcatgttcatcggggaaggtgagtgttgacttccttttaaatggcaagaggtacagggccctgcctgagcagcactcgtgtgtctacttccctcagctgatgattgtcctggaggtccctccccctccctacctctggagtcccccttcaccttcctctttccttcctcctgggagcccctcctcttctctccctcctgacatccctcctcctccctcctggatgttttctgtctgcaagctaaggaagcatctgaccctaatattgtcagggacctcttcttgcagctgactctccacttcctgattttctagcatctcctaccctatccaaacaatctttaccttcttcatcaccagagtcagactgtaggcctgattttaaactttaaggaaacaatttttttcttcatcctaatagcaaataagaagcatgtggtatgtcttttcctaaatcattaccaatttcccccaaagaagttacattttgaaattcggtgatgtgtcttctaatcataacagtcctttgaagtggccaaggagtaaagttctagtggcacagtcactgagtagcctatcctgaccccctccgccattactttcccctcctccaggaagccttcctcagtgccctccttttctgggctttcaggatcccttgagcatacctgtatgagtggattcatcaaattgtattataagtatttatgaagttttctgtccttcctaagttttcaatttttttgagaatagaagtcttcctgtaagaatactttatagccttggggcctagagtttgcctgcatagataaatggatgtgatgaattaatggatggatagagtaggaattttgcagagaaatgagaagcctcagtgccctgtgagtacttccacctgcccatgtccactgactatctcagatgtggagctaagccagggtaatacacatgccatcatatttttaaacatctttatcacatatatattgctttgtaattccaaatagtacaaaggatgtacaatgaacagtttgcctctcttccatccctgtctccaaattccctaatttccccctgaggtggaaccaagttctctaatttccctcctgaggtggaaccaccattaactccttctatagatcatctctgagctgatccatgcatgtagctgcatgtgttaattccataatcctctgctcctctgcaggatcctgcctcagatccctgtgattcttagcatggcctttggctaactgaattgtcctgagagtgaggaggaatgaggcagtgcatgcgaggaaactgagggtcgggaatagcactgtgccagaaaatagaaggcaaaatcacctgcatcctagatcaggcaaaaacaaagtctgcataaactgctctgtaacatggagcttgatatggacattctaaacttcctacctccactccacctgcggtattcactccttttatattaccaacctttgcttttcctagtggtgactataattacatagatccagctttgaggtgaaccagtcagactctgtggctcctccctttacaacagaagccctgtgttcaccccaagacctcccctggacagtcccaaggagaccctcacccacaccaatctcctccaccaattctgtcaccagacagacatcttgatttgtctgagctccagtacgatttgcaaaaagctgtgattttgtaggagttgaggctgtgaagcagccattgtttactggattagagccttggcattccaaatcacacccagccctgggcttcaggagcatgaagaaaccctatttactagcattcagtgggcctctgggtgttatttcagatgcagaataattagcaatatgcccaagaagcaacaaagccttgaatggtatttagtgacaattattcagccaaaccattgcttactattataggggcttattagcaccaaattgtttcgataggaagtggcatcagcaataaaaataatggctgcagcttgctgtgcaatctcagagtcagcagaaaggggctgaaatgtgtgcatgtctcttttacatcccccaggaattcgggggacccactgagatgtgttggcagtgacaggaactgactcaggtggctcagggtagagagcaggcaggctgcttagtgccaaatcacttgctccttcctcttaggctttatttatgcatggagtagagggtgtggggagcagacttctctgtgcacctttgctcagctcccctctggggccaggtgtaggacaccaagggacatactggtatcctctgctctgtctttatatctatacccctgaaaactagaactcaagagctggaaggggcttttagagcaaaaggctgcattttacagaccaaaataatcagtgctcagagatattatttaatttatataaggtcacacatgagggctgagacaagtatccagatggactgggtatatcctttttctatacctttcacacatcctggattgcattttataatctcttttactaagatagacagtgcatagtcaagtccacaagtcagcacttcaggttgaaaatgacaaatgatttgaatgcttgtgatggaatttcagtgaacacagaacaagtaacttgtagtttacacattactcaatgaacttggctcagatccaattatttccatcttctccaatgtgcatttaatcttccatgtttgagctgttaggtgaattttaatgttcatgcctaatccaagatttgtgcttctttcagggtatgggaattactggggaaaccaggcccctctcttacctttgtagcttacaagactcatcttgggagtaatgaaaaagtactacagtttacagtaaaagatttgagattacataaataaaaacatttaataagcagatcaaacgtaataggtataggtgtaaatcttactatttttgttcaaaagaatcaatgcaaacataaaaagggaagtcataagactgaatatttagatattttggtaataagtgctatgtgagccaatgttttagtctgcttgggttgctataaccaagtaccatagactgtgtggcttaaacaagagaagtttacttctcacagttttggaagctgaatgttcgacatcagagcatcatagtgacagcatggttggggttctggtgagggctgtccttcaggtttacagacggccaccttcttcttttttttttttttttttggagtcttgcactgttgccaggctggagtgcagttgtgcgatctcagctcagctcactgcaatctccgcctcccaggttcaagcgattctcccgcctcagcctcccgagtataggcacgtgccaccatacccagctaatttctgtatttttagtagagacggggtttcaccatgttggccaggatggtctcgatctcttgacctcgcgatctacccacctcggcctcccaaagtgttggaattacaggcgtgagccaccatgcctgaccgatggccaccttcttgctgtgtcctcacattgtctttccttggttcatgcatttagccatatattttcttcttataagggcagtaatcctatcatgagatcgggagggactcctaccctcatggcctcatctccaaataccatcacattggtggttagggctgcaacatatgaatgttggagagatacaacatttagtccatagcagtcagcattgccagataaaataacacttcaaaaggccaaatgtaagcttttgttaaatttttaaaaatatggtataggaaatgataggccacttcaacctttcggagaccgtttatatctggagcaaatagctccttctcttcatggggcctttgctggaatcatattttgtggggaagatcacgcccccaaaagttagttaccgagtgttaattgaagagtgatggggttcataaatttggaaggaagagctgtatttctcataaaaggttgcagcctgcagggtggccaggtgtggtggctcacacctgtaattccagcactttgggaggccaaggctggcagatcacttgaggtcagaagtttgagaccagcctggcccaacatggtgaaaccccgtgtctactaaaaatacaaaaattagctgagtatgttggtgcacgcctgtagtcccagctattaaaatacaaaaaattagctgggcatggtggtgggtgcctgtaatcccagccactcaggaggctgaggcaggagaatcgcttgatcccgggaggaggaagttgctgtgagcctagatcacgccactgcactgcagcctgggcgacagagtgagactgcgtctgaaaagaaaaaaaattgtatttcaaaatctaataaaaataacacaaggaaagaccaagcttacttgtgatgatcaatggagaaaatcttcaccaaaatattataaaaaataaattagcaaaatatcgaatgaatggcctaccattaccaagtgactttcaaatgacttttagcatctattaggttcatatagtgtttctaaccaagtaggtttttttcccccagtgagtgtaaagatgttgttatggccggaattttgtctccaaaaaggtgttctagtgcctatagagtctatggaaatagagtctatgtgatattaagttaagatgaggtcattagagtggaccctgatctaatatgactggtgtccttaggaaaagggaaatttggacacagatatagacatgcacacagggagaacatcacatgatgataaagatagagatcagggtgatgcatcaacaagccaagaaatgccaaagactgccagtaaaccaccagaagttaggctacaggcatggaatagattctccctcactgccctcaggacagtgctagcatcttggtcttagatttttaggctttagaactgtgagacagcacatttttgttgtgtaaggcattcagtttatagaactttgttgtgatagtcccaggaaactaatacaggtggttaagagagaagcactacatgatcctaatagatgctaaaagtcatctgaaaacactagatcttacttcttaataaagcaagaaaaacaaacccttatgaaaattgcgtaataaattatatagcacaaattaaaagttagcactttacttgctggggaatttaggaatgaaagacaaaactcctagggcaaatactatttagtactcttctgcacttcttttagtactaaccaatgcaattagataagagaattaaatcagaggaagcaaaattttcttatttgcagttataattgtatactatgtaaaagcaaaagagccaactgacaaactgtaattatataaaattggaaaagttcagtatgatagctggttaatttataagaaatagaggactcttctctaaagaactagaatatgatgcctgagagtagtgagggcaggtagagcagatggcagtgtatggagggagtggatggggttgagtcatcccaaattttggcaattgggttcacaccaagatgctcccaccgccagcctctcccattatataatcctagtcagccttcccatccgcggcacagacccagtagaaaattaaccaagataagcaacagcattagatgagttcaaaaaatcaactcgatccctcatctagcaaacatatgatagaaaattgacattaaagagaaaatctaagatgaacaaatagaacaattggtgccagaaactagaggacttaaaaacaaaaacaacaacaacaaaaaaaaaaaaaaaagaagaagaagaagaagaagaagaaactctaactagtaactgcatagtagtttgggaagatattttaaccataaaacagcaagaagatattatatattaaatggtgcaaataaaaaaataagaaagtgctttgaaagtaagtgtgtgatggctaaaattaaaaattctataaagagatggaagaaattattaaggatatctcacagatcacagaacaagaaaccaaagatgtagaaatgcaagtaaaaggataaggagcatgggaaatcaaattaagagtcacaactctgaagtagaatcctagaaagaaattataaagaaaatgaaggggagcaaaaaaacagtaacaaagaggaaaaaaagttccatggctgaaaagagatgtgcttgaagattctaaagggccttcccaatgcagactgggatttaagaaaaaaaaagttccatactgagacaactcatgtaaagttccagaaatatccacaccaacgcacatcatatgaaattccacaaaaacaaggggaaagagataatcctcaaagacttaaaaaaaaaaaaaagaaaaggaatcatacacaaagaggctaaaattagccaggcaaaaaacttctcatagcaacactaaatgctggaaggcaaagttttgggaaaaatgattttgaacctaaattctatgatcaattatattatcagacaaatcgagatggagagggaaaagactctgtaattttcaagaacttaaaatttgcctcccatgatgcctttctaggaaagctgagtatagttggccttcaagattcatgggacattggttttggggtccccctccaatgccaaaatttggggatgcacaagtccctgctataaaatgtcccagcatttgcatataagctatgtacatcctcccatatactttaaatcatctcaagattacttataatacctaatacaattcaatgctaggtaaatagttgttgtactatattatttagggaataatgacaagaaaaaattctatacatgttcagtacaggtgcaatgtctttctccatatattttggatccaatgttcgttgcatcttcagaggtagaacacttgggtatggagagtcaactatttaccccaggaaaacatgagtggatgtcaagaaagacggtctttgaactgattgattcaggcctactcagatcatctaagatgatctctcttacataaagtcaactgactaggagctttaatcacatctaaaaaataccttcatagcaacacctagattggtgtttgactgcatagctgggaattctaggctagccaaggtgatacataaaactgaccattacagtttgtaaatagggaattataatcctagaccattttttggctgtacaatgtaaatgacttgcacaatcataatattatacacgtgtttggttgtttcttccactttcaaaatcagcttttacacaaaagactgttcatatatttttcatggtataatgtaaatgtcatcaacattgttaatgtaatgatatggatgcagatacaaaagaacatcaagatgtttggagaaggttggttattgtaggaatagctaagggaaaaaactgcagataacctaaacattcaatagttgggaaatagttaaattatggaacatccatataatggaataccatgctatgcgtaggttaagaatatgacgtagctctctattctgataggataatttcaaattattaagtgaaagagcacagtacagatcagtgtgtttagtgtgcaaatatatgtgtgtgcatatatataatatttatagtatatataagaatacacatgcacacacacatatatgcatgcatatatatgtgtgtgtgtatatatatatacacgtgtatatatatatatatatatacacgtgtatatatatatatatatatatacacacatgtgtatatgtatataaattcttaagaaagatgccaacgaaaggaaagttttagtttgatacttttgtagaaagaaaccagaggtagaggaagaaaaagaaacttttatttttcattttggtaccattttgacttttttttaacaatgttcatgtaatatgtttaatattattttaaggctaacagtgttatctggctgaagagatgaggagccacttaaattttcgtcatattttccaggtaaaaaaaagcacatgacaaattttacatgaaaatgttttctgaacaccttgtatatactaggcatgcaaacatacagaagactcctgccctgaaggagctccaactcacagggagatacatacattcaaacagaatattagaaaacattgtgatgcgataatagaaataagcacagggtgacatgggagcatcgaagtacagactgtgccaaatgctagttatgcacttcaaaaatgggaagcattctttttttattttattttattattattatactttaagttttagggtacatgtgcacaacgtgcaggtttgttacatatgtatacatgtgccatgttggtgtgctgcacccattaactcgtcatttagcattaagtgtatctcctaatgctatccctccccccttcccccaccccacaataatctccagtgtgtgacgttccccttcctgtgtccatgtgttctcattgttcaattcccacctatgagtgagaacatgcggtgtttggttttttgtccttgcgatagtttgctgagaatgatggtttccagtttcatccacgtagaaagctgaaactggatcccttccttacaccttatacagaaattaattcaagatggattaaagacttaaatgttagacctaaaaccataaaaaccctagaagaaaacctaggcaataccattcaggacataggcatggcaaagcattcttgccattggtggttggatgagaggtaggagcgtgtggtctggagtgggaggggtcgagtcaggtgactggactctgaactttgctttctcatttataaaaaaagtgactaaacacttatctcatgggttgcatacagattacataaaatcatgtctataaaaagcctggcacatagtggcattcaaatttgagtgctttttcccttcctgtgactcaaaccagaagcctggaaattgcgctaggtagatgtttcctttttttaggttaagaacaacaagataccccagagatgagacaaatgacttgcccaacatgactggctaattagaggtagagctgacacaaaagcatggatgacctgacacctcagttgattttccttgcatggtacctataaggatagtgacatttaatcatgttccattttctatttcttgtgacaaggggcaataagaggtggtatgaaaggcagatgggtcacaaaaccccaaagcactggctatgttatgcttcttgatgaaatgccaggctccgggtctgcaaggaacagtccaccaccagggaccaagaatcttagggatttatctgcctcttcttccccaccaccctcctcctcatgaaccagtcaatgatgagcagaggcttctattctactctgaaggagctatttatgaatttgtgttatcaacataacaacatgttcataacaccaagtatgttccagttgtgtgtgttctaaggagttaaaagtttatgagggaagagggatgcatttgagaaataaggaggaagtcttcagatgttcagtttttaagagatgaaggtgaaagtccacttctccattcttgatttttaaaatttttaccttttagtgatagagtttcactctatcacccaaactggagtgcagtggcaagatcagagcacattgcagcctcagactcctgggctcaaggggtcctcctgcctcggccccctgaatagctgaaactacaagcacgcattaccatgcccagctaattaattaattaacatcttttttccatctctccattctgtagtacttgtccacaccaagtaggagaggtaagagcttcaacagtgaaagatatcttaatagctcttaaattctcaaggaattctaagggcaggagctaataaaataattaacactgcacttctgaagggcagccacagataaactgcacctaggagccagctgggtatctgcacaagctaagttgacaaaaaaagctcttcaaacacttcttgctaatcagctcaattacagattatcctgcagagaggagttccaaatgaatgctagttaaatgttgtgctttgctattgctctgtgtaaaaagctagggttaaatttttgctgtgcccattgttaaacaaaaagactgtccttttcattaaaaaggaagtgaagactgtgggctatttctgctctctacaattctttcagcctgaagaacacttagcacctgggctgggctgccccagaccttcatctgcttggggattaatccagagagctttgatttaaagaactatagacagcagaaatacccccacagtcttcactcattttttaataaacaggacagtctttatctttaataatgggcacaactaaaatttaactctagctttttatagaaagcaataaacagggtatcaattatacaggtacgttaacaagtcaaagaagagttgagcattttgcctcttaaattacttcttctcagagttccttggtccaggaggtctctgatccttaggatccagattattactgaatcaggcagtgtcatgtcctttgtgattcatgttccttctattatagacataatttgatataaacagaaggttggctccttaaagtacttcaggagaatagtgttatatgcacaataggataaaaatatttattatcaataacagtattactatatactgagcatttactgtgcaagaaaatttcataattgctatgcatatattaactctgtgcatcctcttaacaacactctgaagtaagtgaagtaagtgcaattaattattctcatcttgcatataaggaaattaaggcttataaggagctcccccatactatcaacatagtatattagctacctatttttcataacaaattaccccacaacttagaggcttaagacagtaatagacatttatcatctcataaaatgtctaggtatgaaattcagggattgtttcattgggttttttggggtgaggatccctcctgagattacagtcaagatgtcagctggggctgcaacatatgaaggcttgactggggccagaggacccattgtcaagataattcactcatatgactggcaagtgggtgctggcttttgtaaggagacctcagtttctcctgggtcaacatgggtatctccagaggatgctgtaatgtttttgcaacatttcagctggctttgtccagagtgagcaattcgagagagagggcaaggtggaaatgacagtgtcttcataacctagccccagaaattgcacactggcacttctaccatgttcttctgtgtacacaggactgccatgatccagtgggggaagctccaacacaagggtgtaactatgaggaggagagaatcattggaggatttcttgggggctggcagaatttgggtttgagcttcagtctactctctgtaaagctgtactcttgaccactctatgatattgcctccctcataaaagtaatcccttaagtatttaagatacttagacagtcatgaaagagtaaacaatgatgacataagaaaaacaacagtgtactgaatgctcattatgttccaggcattatactaagttatcagtagcatcctctcatcatacctgatgatgaggttcagagaagttcaatgattttctcagagtctcagaagtgaaatccaaatggtctttctgaatgtgaagcctttgtgagatgaatgaacaagtatggatgggggatacttacatgaaggggaaaacgaagcccagggagcatggatctgtgattgagaaaggacaggcaggagaaagcagagttggaggtgaaaatcaggctgatgcagtcaaaagaacatcaccactcaaatgagctgaaattgggggtaaaacctaagaaatagataaagtgaaagaactgtcagggcatgaattacacactgcagtttgtcaaatatcacattgcccttatcatctagttctgttctgctacatggatttatcttattcagagaaatcgttttgttttcttaaagacaaggagataaaagagagagagagggagaacttggcttctgaacttctctgtagactagatatatccacttgagtaagtagaaaattcttgaaaatcaaatgcatttttcacttcaaatgaaacccatttctatatttaaaaattattaaccatgatctaactgatacacaacgttgcaaatccaagccatgaactaatcatagagtgtcagtgggcattctagtcagcactgtgctaagtggtagaagatatttagaggtataatatgaggcatcattcatgtcccagagagacttagatttatttggagagaaaagacatacataaggatccctctgcaaaatctctacccagtgattctttgagaatgagacagggaaggaggagctaataaaggattcattactacaactcctgcaggagagttcagctcctagggaatcttggagaaacatacagaatgagatacggtttggacttgtgcccctgtccaaatctcatctcgaattgtaggaggggcctggtgggaggtgattggatcatggggatggattgtccccttgctattctcgtgacagcaagtgagttctcacaagatctggtgatttaaaagtgtgtggcatctccctcactgtgctctctctctctctctctttcctgctgccatgtaaagaagggtacttgcttccccttcaccttctgccctgattataaatttcctgaggcctccccgtcatgcttcctgttaagcttgtggaactgtgagtcaactaaacctcttttcttcataaattacccagtctcaggtagcagtgtaagaacagactaatacagaatgcttcctagaattttttttttttttctgaagaacacgaagctgggggcagtaagccactggctgccatactccactggttgagggttaacccccagggtaacatcctttccccttctgactgtgccaggctgtgagttgagtagactactgtgactttgaagaaagccctaaggcagaaaaataaagccatgccatagcgtgcccttgaaatggcgacactgacagtgggcctggagttgcctaccacagctgtggtgaaatcagaggtaggtgaataagatgtggtagaaggcaaagaagtcatctgctacaatcaggaacgtgaaaactacctcctcctgtaccctcaaatcaattgtcattggccagaaatgggtcctatggccacccctagctgaaaaggaatctggagaatggagcagttttagcgggacagcttgtaagagacagtttgtaagagccatgctgaacaaaatcagaattttacattctgtaaggaagaataagaatgggtgtcaggcaggcaactaacaggttctgttcaacatcatgtctaagagtagccactctctccttcctaggtagagctgttcctcctgtcccccaaatatctataaaacatgcagtatggggacaaagttatattaggagccaccagccaatcttcctaccatgaaattgtcaacaacgtactttggtgattgctatgccctcgtggctcatggagtgtgcagaagacgtggcagctatataatacaccatttaagcagctgccatcaaccctcttccacaaatttagctttccatggcagttcttgagaagagcagagagtaaagttttggctgatcatcatgttggcaaaccatggagagaggattgggcaacagaaggctcttttcgttcacatctgtagctcaactgcttaacatgtagtaatattcctggctgcccctggaaggtaagggtctctaacagttgtcttgaaagaagtgaaaaccagaagacagacagcctctctccttttttttcccactctctggctctttttcaaagaggactctacatgactcttgaaacttgatttactcctttccaaaacctccaacacaggaaaagggcataaaatgggaaattcattcctgtttcatatccctttcctcctgttcagcctctgtggggaaacaatcgtatggaggctgttaccgctggtggccatggtaacaaaataattgacatacagtctgaaagtcataaacataatgaaactatagtttttattgcacttcaccctcatcactgattaaatcagatctgcataatgcaaagatattaaatttccatgtttctcattttctctcccctgccaataggaaggctttattgtgaggcaaccctgacagtgggctgggaacatcattgctctagattttgctgaaaaatgtttttttaataattggtgctgactggcccacaacgcaaagcaaacttctgagaaacggttggattctggctccgtggagatacagctgcttgtttctggcaggtggaggttttatggagctctaagggagtaacgaagaagaaaagggatgtcaaaggggctagcacaccggagggacacattaattcaagaaataattgtggaggaattttactccttagcccgcacccctgacctactgaactgaaatggaaggaagacagatgaaaacacatctggaccaggcctgtgtgagatctgggaataagagacatgaatggaacagagcacctgaatgcaaggtactcacagcctaaatgagatgctcaccagggtcacttgtccccagtagcctgtttccaacaagaaccaacaggagtggggattggggatggaatctgtgctggccaaacagtacatcattgtgtgatcatgtttcaggcctagttctaggttctccaaggacttaaagattgatgatattgatgcttataacataggaactttcattataacagaaaggtaatgtgatgagaggtacaaagtgctgtaaaaattttcaggaaggagcacttacctccagcggaggtctccaagaaggtactaagaggacattgcccttagctcatgcttacatatgtcggagaccttgcgaaatgattttactggaaggagacttcatctcttgttgtattaggctgttctcacattactacagagaaatattggagactgggtaatttataaagcaaagaggtttaattggttcacaattctgcaggctgtacaaggaagcatcatgatgctggtatctgcttggcttctggggaggcctcaggaaacttacagtcatggcagaaggtgaagtgggagtagcacctcacatggccatagcgggatcaagggagagagaaaggaggtgctacacactactaaatgaccagatttcataagaactcgctcactattatgaagatagtaccaaggggatggtactaaattgctcatgcaaaattcgccctcatgatccaatcacctaccaccaggcctcaactccgacactggagatttgggcagagacacacatccaaactatgtcttttgtattttagtttaatttcatcttagaagaaaatgatcagaaaaaaaaggtagaatgaggcagtggttctgaactggggacaatttttgtcccctccttgacacccagaggatgtttgataatgtctggagaaattttgattgtcacaactagggactggtgctactggcatttagtgagtaggggccagggacgctgttaaacatcctacaatacacaacatagtcccccataacagagaattatctggcaacagtgatgaggttgagaaatcccggcacaaggagaaatacagttccactaacacgctactgatacccccagagaccaggagagaggcagatcatagcaggttctgaagctaagttctgcccctgcagagcaggtaatggatggtcaaggctgtgtcaggtgaaggggaccgacactctggggccaaggcatgtcatccatgaggctggagcaggagggggcctgaacacttcaggcggagatggagggctagaaaggagacacaccctggttttacttttggtatgtttattttacttccttgcctatgtctatgtaccaggagcctccccccgctgccccccggccccctcggccccacaaccctctctatattcaccgctttcctctcattctcctctttctttcttggattattcttttctatcctctactttcctacatttcaagcatcaggtgggtagggatgtcatattcaaggtcagggttaaagaggtgagagggaggaaagagttcaatttcggggcctattcttcccattttaagacgttccatgaaaggaatagctaccatttcactttctcaagttgaaataaagtggccaaaatcaaaacagaaccaaaccgaaaagtgcttgaaatccttgggcttggatctttgattttaagtctcaacaaatttgcaaagtagttatcaccatttaatggatggaaaagccatggctcaaagacagtcaagaaatcttccaaggcaacacagccaggaaatcattgtctcagcactccgttatagaaattatccaccgggcgcagtggctcacgcctgtaatcccagcactttgggaggccgaggcgggcggatcacaaggtcaggagatcgagaccatcctggctaacacggtgaaaccctgtctctactaaaaatacaaaaacttagccggacatggtggcgggtggccaagtagtaccagctactcaggaggctgagacaggagaatggcgtgaagccaggaggcagagcttgcagtgagccgagattgcgccgctgcactccagcctgggcgacagagcgagagtccatctcaaaaaaataaaaataaataaataaataaataaattatccaaaggtggtgtctgtatattagcctctttgttgcttatttcaaaagctggggctaaactcaaattttcatgcacccagttgttttaaaaatagcccaaacaagcagatttgtagccatttcaagtctgtctcctttgcatattccaggaaacctcaggccacatacgttggccataaagcctccaagctgctacgaccctggccttaggccctctccgacccagatcctcctaccttgctgctgagcaacgtcacctaaactaagccccctttctaattcctccagccccagtagttcccttgcccgcctccccttctggatggtggcctctgcctccatccatgaacttgcagacagtctcatgccataagggatgtcccagccctgtccatgcactgtccaatacagcttattgtatgttattgcctttcatgatcacccccgtctccttgctctgcctccaaatccctcaaactccctacatattccaagtcagattttcagcccagtgatttttttcccactaccgcattgcttccaccttagtttcaaactttttcaaacaagtaggcttatacaaagaaatatagtatctaagtaatgttcctagagaagggccaggaattgatctgaaacttaatacatttagctcagttcctcaaacctggtaaaagcttgcatcatctagagacagcagaaagttcttatagatactttattattattattattttatttatttatttatttatttattttgagacagagtctcgctctgtcgcccaggctggagtgcagcggcgcaatctcggctcactgcaagctccgcctcccaggttcaagccattctcctgcctcagcctcccaagtagctgggactacaggcacccgccaccacgcctggctaattttttgtatttttagtagagacagggtttcactgtgttagccaggatggtctcgatctcctgacctcgtgatccacctgcctcggcctcccaaagtgctgggattacaggcgtgagccactgcacctggccatagatactttattattattatttattattgctacaatttccacatgtcctctgaaaaggattggaccaggaatagtgccctagagacttggtagtgctcatcgcgttattaaaaacttctgttcactgagcattcactccatgccaggctcttaccaagatcttgaacagaatcactcagtggtagtggcacatcttccagtccttaggccatggtgttattcatgtagcagacagggattccctatcttccgtggtttccacgtgcatcctgtcagtttactatcttgcttaagtttcctgaaaaacataatgcaagggacttgccacctaaaaatataatgccactcctgacttgagtttctgtcctggttcacgggctgctcctgtcttttacgggaccaacccagcagccagctctggcttgaaggaatcaccaggggaaaggaaataataccttttagcaggcagaaacacaggcaataaaatcatcccctggatcctgaagttcctgggcacctagacgagagggcaggagagctgttatttagcagctttcagttctgttatgtctgttatgtcttcctaacaaattgctggcttcagcaactccacaccaaaagctgtggttataaatattacgggtcccctgagggccacaattcatgggttgataaaatcccacctcccaaggcagagacccattggaaggaactgaaataaaatgtccttctttctgatcccggatgagccatattgaagccaatttcaggcagggatggggaggtggtgctgggggctgaggagggacagaagtatagggtgtgcctgagagttggtggaagggagagatgtatgggaccccctttgattgctttcttccctaatcaccattattcggcccagcaaattggaagctaatgaaacttagtgactatgtcctatatgacatttctagagaaatgctagaaaaaggattgaatcctgtaatggtcatttggcactttgttggcttggagtctaccagatcagcccttcggagttgtgttcttgtcttctgctatggtaccatgagcatagtatctaccaaaagatgaatagtggaaatgataataattgtagctaggtgcttactaaatgccagacccttttgtaagtgtcttatgcatattattgttaactttttaagtcctcacaacaatcctaggaagtaaggcttgttattcttcccattttatattttagatataagtaaattgaagaacagagattaagcagtctgcctacagatcttgaagcaggtggaaggaaatcaggccattggctttagagttcatgctttttcgcatgcaacctcaagttatgaccgcatggggtatttctcttgcttttcatggacaagaatgactaataaagatgaatatatgtctatagaatgcgatctcaactattgcctatttttctcaaagcaaaaatctctgatgtaataaaaataatatgcaaagtgttaaccaaccataactttaaaaaatattaagaaaaaatgaactcaggaaaatatttcatttaaaaaaaatttaagagaagaggacccaaatgttgcccaggctggcctggaactcctggcctcaagtgatccccctacctcagcctctcaaatagctggaactacacgcacatgccaccacacccagattcaggaaaagatttaaatacaaaaatgaaggtattgatttaagacctttctgactaatttttttttttttttttttttttgagacggagtctccctctgtcgcctaggctggagtgcagtagcgcaatctcagctcaccacaacctccgcctcccgggttcaagcaattctcctgcctcagcctctgactaatttttaagtgtaatgtttctttgctaatcaaatcttggttttccctaccatgctttaccgctaattggtttgagccctgtctagaacacaggacacttgggaacatttgcagctttcttgtttcatggtggcatttcatgggtacaagaagctttggggtcagtccccacagcttatcagtcaaaatcattttgggcgctagttaaaaatactgactccaggctgggcgcagtggctcacccctgtaatcccagcagtttgggaggccaaggcgggcaaatcacggggtcaggagatcatgaccaccctggctagcacagtgaaactctgtctctactaaaaatacaaaaaaattagctgagcgtggtggcatattcctgtagtcccagctacttgggaggctgaggcaggagaatcgcttgaacccgggaggcggaggttgcagtgaaccaagattgcacctctgtactccagcctgggcaacagagcgagactccatctcaaaaataataataataataataactctaggtcttactctaggtctaatgaatcagaacccttaagaaaggggaagcctaactcattagccatagctatatgatgaggtgctggaattgcatctcgattgccctggaatggtaccaaagcacgagtattgattaaagcttttgggtgagaacagtgagaagccacggttgataataatgagcttgacctttctgcactattaatggctatattttgggtagtggccttgcttctagcatatgctggacacacttttttccatcatcagaaaagacttatacaattcgagtaaaaattaactagctgccttcatcccttggatcaataatcagaaatctactggactcatattgaaagtgggacctctctgggaaggcggagatggtttagtgatagaacatacaaaaggccgggcgtggtggctcccacctgtaatcccagcactttgggaggccaaggtgggcgcatcacttgaggtcaggagttcaagaccagcctgctcaacatggcgaaacctagtctctactaaaaatacaaaaaattagccagacgtggtggcaggcacctgtaatcccagctactcgggaggctgaggcaagagaattgcttgaactcaggaggcagaggttgcagtgagccgagatcgcaccactgcactccagcctgggcaacaaaaagagactccgtttcaaaaaaaaaaaaaaagtagatgagatttaaagaaataaaatgctgtatcaaggaattcctcaatttcccatttttagggacaagtctgactcaagaatggatggagtagaagaatggagtttcacaacaggtcactggatagaggagatttgaaagtttagagatcccaaaagatgcatgctaaacaggatatttcatcctcttgttggttaatcttaagatgccatccccagctttcctgccaatggaggttcgctgacttttccttcctgtttaactttggggtgctgctcatggaaagggtcttccagcttcacacacctatgtgtgttcatccacgtgtacgcgtgccaaggagccctacaccttccgttatctgatctcctgcatcccatctggcctgggtcatagcctcagttctagcttgattccacggccagctcactcaggtccatttgacaggtccctgtgtaccagcaccataaggacaacattctaaatgccaatgtcgttatttctccaacccccttcaaatggttctgtttcctaacgggagcttccagcatcagggaatttacacccttcatggaagacaccgcacagtctgtggtttttactcatcatgatgacataaggaggcacttttctcatgcaatacggcaaagccacttggggagaaacgatcttcctgaagcatattcaagagagccaacaagacagacattgcaattccctgagctcccagacacatccagtttacgcctctttccgtttgcttcgggtttgttccgcgcgatacatctcaccaagcatcttctggcctcctccatgtgccaaaagggcccctccgtggatggcgcacacacactctcagagccacatgaggattccagcgagcgttcaggcactaatgaattctccttgtgcagaactgagcacatgcacagattgcacgtgggaggagatgttctctcagtgtctgctctaaatgttgtttctgagttaatcgttccaagacagggaaatgaatggggattgcctgagccacccttgagctgagacaaatcagccaggatcattggactctgcaggaggaatttttcttctgctctttttatccctaagatccatgggttagttattggaccactcagctattgtttgctggcaggcccctgtcccactcctcccctgctctgctcccactgggcagttgccagtgtggcctcagcatctatggtctggacttaggggcagggactacaagagagaggactaccctctccttctgtagtccctgtccctaaggtggcagtgattttccattgtggttaatcacggcttctcagttcttccatcccttatgaaaccgattccctgtataaaattccctctgttttaaaactcctgtttcctctagttcttcctttttctatgctgataaagttttaaaataatagataatagggctgggcgtagtgtctcacgcctgtagtcgcagaactttgggaggctgaggccggcggatcccctgaggtcaggagtttgagaccagcctggccaacatggtgaaaccccgtctctactaaaaatacaaaagttagctgggcatggtggtgcacacctgtaatcccagctacttgggaggctgaggcaggagaatcgtttgaacccaagaggtggaggttgcagtgagctgagatcatgccactgcactccagcctgggtgacaagagtgagactccatctcaaaaaataataatggtagataacactttgtacagcattaggaaatgctttacattattaactcattgaatcctcatgactttcccatgaggtagggattagtattgtgcccattttacagacgtggagactgagcaatagagtgggtcacacagtccattcatggtggagctgggattccagctgggccacaagtgccatgctttgaacaacaccaacaacaaaaaacaacaacaaaaaaaaaacatacaaacaaacatatctcaattcacagaatttttgaagcaagagcatttagggtgctggttctcagagcgtggctcctgaaccagcagcattagcatctcctgggaacttcaaaatgcaaatcttagcctatactccttaacatattgaagccaaatgggcaggggagaggaggaaatctgttttcacacaccctcctggtgattcagatacttagtaaagtttgggaaccactgtcatagaacagggttccatccttgcatgttgaggtcctggaacagttttggggccactgtggatctatccctggaaaggaatcagtagctgatttgcgattcccttcacctcccctgtcccatcacctcctgttctacctggcacggctcctgtaggtggctatgcacaccctttcatcttaagcaggacactatgtggtaggcacaacaatgccctccccctccacccaaagatgtccccatcctaattctccggacctgtgaatattttgttgttgttcttgagacagagtctcactctatcacccaggctggagtgcagtggcaccatctcggctcactgcaacctccgcctcctgggttcaagcaattctcctgtctcacccttctgagtagctgggattacagggggacgcgccacaatgccatgctaattttgtatttttagtagtgacggggtttcaccatgttggtcaggctggtctcgaacccctgacctcatgatctgcccccccctaggcttcccaaagtgctgggattacaggtgtgagtcaccgcgcctggccagacctgtgaatattttatgttacatggtagggaggaatgaaggtttgcaatcagctgaccttaaagtaaagagattctcctggattttccaggtggatctaacataattgtaagagtcctaaaatgaggacgagggagggagaagaatcagaactagagagatggcgagttttgaagacagaggaaagagacacaagcagaggaatgcaggcagcctctagaagtttgaaaaagcaaaggaacaggttttcccctagagcctccagaataaacacgccctgctgatccctttattttagttcattgagacccatttttgacctaatgacctccagaactgtaagataataacttcgttttgagttatcaagtttgcagtaacttgttacagcagtgataggaaattaaaaccccataaaagacactcaagggcatagctatcactcacagctgtggtcgtaaccacccctttcatcaaatttcccatatcccttcctttcccaatcttatcttaccttttttgcactaccaaatctgagttggttttgcacatctgtttgcctaaaccctgttacgtgttccctggaactcaggctctatgatcacttcctcctcctctaacttcagtctttccttggaacattccttatctgatgctggacaccccttgaaggccctagtgtctctgaaagccactcaagctgaggctgagttttctctcgcagcccaagacctcagggtcactttccatatcttcctaattcaccacccccacctgtctcctgcaaatcctttcttatttcaactcatgctacttagctctgtcagtctctctcccttctccttcctgccatctgttatcctgccagtcactccaccactcactgaaggtgttagctgttcacttatcctgtctacgctacccctgtgctgatgaaccataaagcgtcctctagcctctgagtcccttgattcaccccctccaaatatatttttcaactctacatcctctatcctcttccatggtcacatctgttccttgtcatctctggtaaccagatctccctcaactcaaaaccccaactttaaaggtttgagcctgtatatgccacttctaggtccttaactccagcattcccaatgctacaatcctttgattttgttgagacttccaaacttcatccccacttctctacttgcccagctacaaattcatggctcagtttaatcacctcttcataaatattaccttcagtcccctggaaacctgtcccccatcccccaaccccactgccttgctcacttggtaaattccagccctggctcaatccatatagctgccttctaaattgcctgcacatgagcagctgagttttgggtaaaaacaatcacagatccaggttaactgctttgctttagacatcacagccattattctcacataagcactccacaccactgatgcatcggtcctccttaattgccaaatccccttctccacaccctaacatgactgttttacagcatttcctttctgctccttccgtccccactgtctcctctcccacactctcagttggtgatctctcctcatacctgctgagaacatgcaaaccatgagataagaatgtgctcaacttcccatcagcaaatgtgttattctttttttttttttttttttttttgagacgaagtctcactctgtcacccaggctggaatgcagtggcgtgatctccgctcactgcaagctgcgcctcctgggttcacgccattctcctgcctcagcctccggagtagctaggaccacaggcgcctgccaccacgcccggctaattttctgtatttttagtagagacggagtttcaccatattagccaggatggtctcgatctcctgacctcgtgatccacccgcctcggcctcccaaagtgctgggattacaggtgtgagccaccacgcctggccacgtttattcatttttatccatcctctcctctttccctcctttggtaaagaagagagtatttcaccactaacccaaacttaatctttccactgctgtcctgagtgcccttcccttttgtttgctcaaggactttgatgctttgttttttctttttttctttctcatcataggtctttctgaagagaaacctatagcttcaaatgcttacatgtattagaaaatgaagaaaggcctaaaattaattatctaactgtccacttttcgaatttagataaagactaggagaaagttaactataaacaaaaaattaagagaagagcggaagttaatgtaataaaaaatcaataaagtcaaaagtcagttatctgaaaagatcaacaaaacagataaacctcaagcaagcatgactaagaaaaaaagggagagaaattatcaacactggaaatgaaagagggattattattacagattatgtaattttcaaaataattaaaagaagaatactatggttaactttatgacaataaatataaccaggtagatgaaatggaaaaattcattataaaactcaaattaccaaaactgatacaggaatagacttacccctaccaaagaattaaatttattatcaaaaatcttaccacaaagaactcttcaagcccaagtggtctcattagtgaatttcattaaatattcaaggaggaaaaaaaataccaaattaacacaacatatttcagaaattagaggaacaagctcctgacagaggcaacagcctgggtgaatcccgtagactttatgttgagcaaaagaagtcagacacaaaggagtgtggattttgtgattctattcaaatgacattctaaattagcaaagctaatctattgtggaaaacttcaacagcggttgcctctgttgaaggcaacagagtaagggacgtggactggaaagggatcctagggaactttctggaataagaggagtcggttccatggatgtcaaaattgtacatttaagatttttgaatttcaatctatgtaaattaaacagataaacaatcctgaaggtggagagtaggtgtagcgatggaacaagaatgacaaaatatgtacggttgttgaagttgagtgatgggtgtgtgggagtttattgccgtatactgtttgtgttgtatgagctttcaattctccgccgtgaagagtgaaacattgaaatgttgatgaagtttgatttataaaatgagatactgcatttgtatatcacactctttccaatttgcatagttccaatttatacaaaaccgagtatatttgtatttccttccagtcttattttttaaattgttctaagcagtactgaatatgcaattttacactcagctttcctactcacattacactgtaagcatctttgcagttttacattctttgtgatcatcaattttaatggccacccctctggcttcttaatgctgaaactcaaattttatctcattattttacctccattgattgctagtgctactcagaataatacctgctactcaggtagtctcatttaattatttatgctcgccttatactaagggggatttaggtggcctgaaaagacacataaagtgcaacaaaatagaataaagttaaaacacaatatacaaaagaaagagaaacaaggttaaaggcagggtttcatcaaggatctttaaggcaggaaaaatccaacacccttctttgccaaggtaaagcttaacaaaacacacacatctaactttgagtaatgattttcagtgtgtgtattggttgaagtggaagtggggtaaactcaaagattaaccagagggtttataacagggttaccacacaaagtagtcttttatgagaaatagcttttttttttttttttttttgagacggagtctcgttctgtcgcccaggctggagtgcagtggtgctatctcagctcactgcaagctctgcctcccgggttcatgccattctcctgcctcagcctcctgcagagcccagtcactgcagagcagcaacaaggattgtgggctgcaaaacggccactgcctcccttttgcaggcgcacaccaccacacctggctaattttttgtattttttagtagagacggggtttcattgtgttagccaggatggtctcgatctcctgacctcgtgatccgcccgcctcggcctctcaaagtgctgggattacatgcgtgagccactgcacccaagttaaggaatagctacaatattgataactctagttttggaatagttgcataatttgagatatagcttagaattgctttttatcttaagtagctgagaggcaggacagagaaatgggttcacctcccagctctggtgctccccagccggttattttgagaagctgacctcacctttctgattctttgtttcttcctttataaaactggagggtgataaatgtccactttatagtactgttgtgaagacttatcacagagtcattcattcgacaaatatttattgagacacactacatggcaggccctgttccagtcacacagcaaaggttgactatcatctctaacattttgacgctcaccttttagtgggggtggagacataagacaagaaaataagcaagatcatttcagattctgatgctttctatcaagaaaataatccatgctatagggctcaagtaaatgatgggtatgtatgtgtgtatgtgtgtgtgtgtgtgtacacttttaaagatgcactgatcagagaattcctctctgaaaaagtactattttttacagggatctgaaagatgagaagaaagatactagggagagccatttaagcaaagggaacatcaacaatgagcctcacattttaagaagcagccagaaggccagtgtggctggagcaccaggtatgaggatgatgatggagagagatcagagaagtggacaggaacgagagctcatggaaccagctgggacctggattttattccgtgcataaagggaggccactggaggatgtaagcagtggagtggcatgatctaatgggtgttttaggccatggtgtggatgatggattgtagagggacaagagtggaggaaggcaggccacctaggaagttaatgcatatgcacctaggaggtgctcagtatgatgcctggggcctaacaagcactcactaaatattagttattttgaactactttttagaaaaaaaaatagctatcaggacaacaattcattcagatcatcttttatttgagaaaattaagtcttcgtgttctctgtaacagagacactttcttctagctcactaagtatggaggctttgtgaagtgtcagcttgcctaggttgacctacgttttccagaattcttttttctgggtgtgttctattagcgtgggttacagacagcttcccatgggagatgtgggagtagaagggaagcagtggccgttttgcagcccacaatccttgttgctgttctgcagtgactgggcctgtactcagctgggccaggctcccctggagcttccttcagcccccggacaggcgtgagtgttcagcaatgggatgcagtgtcctggcttctgaaggtcactcccaccaggaagaactgacgtgggtttcagcccatcctcacgggcccagctcatatttgtgggttaccatgcattcctactttcctccactttacatccatctgttcttctcaactgtctgccctttgcacttcaagctccagcattaaatgtgaagataacagccttgtagaggctacataagcagcttccacaattgggtaaggccaaatcccttatctatctctctcagtggttctgtttctccaattactcctttatagatacaagaatggtagctgatttaaagaaatatattcaaaagaaataggactggctgggagcggtggctcacgcctgtaatcctagcactttgggaggccgaggcgggcagatcacgaggtcaggagttcgagaccagcctgaccaacatggtgaagccccatctctattaaaaatacaaaaattagcctggcatggtggtgccgtcctgtaatcccagctactcaggaggctgaggcaggagaattgcttgaacccgggaggcggaggttgcagtgagccgagattgtaccactgcgctccagcctgggtgacagagtgagactccatctcaaaaaaaaaaaaaaaaaaaagaaataggaccaaatacatccccaatttacacctgaaaagctctaagtgcccttcagtagacagttcacaatcatcacagttctgggcatgtaacaggcattcaataagtattctttaaagaatgtatgatccagttctggattttaaacatgtggtatatatgcataatggaatactattcaacctttaaaaaaggaaattatgatatttttggcaacacaatgaatctgaaggacattatgctaagtgaaataagccagacacagaaagacaaataccacacattctcacttatacatggaatctaaaaaagttaaatgtataaaagcagagagtagaatagtggttatcaggggctgggggaaattttggggaaaggggagatattggtcaaagggtacaagctttcagctggaaaggaggaataaattccagaaatatattgtaaaacatggtaattatagttaataataaatgtatacttgaaaattgctaagagagtagattttaaatgttcttatcacaaaaaatgagaagtgtgacaggtgatggctatgttaattagcttgagttaattattccacaatgcatactatatcaaaacatcacattgtataccataaatgtatataatgtttcatttgtcaattaaacaaacagaaaaagaatgcatgattcagttccaattcccttggcaggttacaattgaggtttgccgtcaactttgccagggctccatgcaggactcctcctgtggcctgtcctaaccagaaacacgcaggaaaaggagtgctaggaaacgtggttcagcctagtcaagaagacacaactggttccagtctatacgatctgaggctaagaaagatcaatcaaagctattaatcgctcactagtttcctggtttctcattctaggaggtggtcgataataacaattgtccatgagagaccagctctgtcttaagcctatctgtagctcttgtaaaactttgacctaagaaacccatactttcaatttgttaggcaaattatgagaacacaatattgatggattgaacaacaaaccaataggtttacaattcaaggggcgtagagttttgcttattttgcaaatggagtaaataatactctggttccagtcagatgcggccatctttgaaaaaccaataaacgttaacaagtctgcaaacattgaaaatcgttattttgtgaggtttctaaatagctctgttagcaaaagtatcattgtgtttcactcattttaggtttgaaaatcaaaacgtctgtgctatgcgatgtttcaggctgtatatttagtttatagttccaaaaatgaggatcctaggtgtccctatgaaagactctttattgccaatttaatagctcttcttccacacttattttttgctaaaagagacgaaatgttcctgaggctgtaacgtatcaagcctagggaacggatcttgaatcaaatctaattgggagaccctggaaaaaaacctatttctttgtcgttgaaagaagagaaccattagagaaaagggtcttttttttttttctctagccccatctctttcaatctttcccagctcctgccttctgcctttgaaagcagctatgatgctcatagctgcatcaatcattttacaacataacaagccaccatatttgggttgacggagcagaagaatggaaagaatctgggccttgagactcttttttttttttttaatactttaagttttaggtacatgtgcacaacgtgcaggtttgttacatatgtatacatgtgccatgctggtgtgctgcacccattaactcgtcatttaacattaggtatatctcctaatgctatccctccccactccccccaccccacaacaggggatgaagctggaaaccatcattctcagcaaactattgcaaggacaaaaaaccaaacacctcatgttctcactcataggtgggaattgaacaatgagactcttgaacagctgaaccagtcccaggctgcccacctacagactctgtgctctgtgagataactaaatgtcattatgtttaagcctttccaaaccatgcattctgttacttgcaaccaaagccactcctaactgatagagcctcttttatgctactttccagattcatgctctgggcaactgtgttgtagaacttgataccaggtctaaaagctggacttggctctttctagagactgtttgttatttttttctaaataataaagttatgtctatatttgctatgcaaaacatgtgttatattgggaatcatatttgtcatggagggaagcaatcactcctttatttagtgatgccaagaaaggtatcattagacttgcttcttaacctaacaatcactctccaacaaataatttcttccaaggaataactaggacacatgaagtttaaatggtcatgagacaagaccatatacccagtcatgtcaaatttgcattggcaagggaatgtacatgaaaagataagctccatcaagcttttcaggaattaaatcaaaaccaacaaaacaaaaaaaaaatatcttttgaaccaggcaaacccccaaggttgacaaagataagacttgcaaatttatcctaatttttgcaagagttccacagttcattttctgacagctggcacaataaagatttaaaattctgaataggaaggaggaggtggttgccatctgtggccattacctgatctctctgatttcaactgccagggataacaccatgggacatgtagcatttgtctttaattaaaaaaaaatatttcatcatagcctatttcaaacacacaaaagattgcagaaaataatatatacccatgtactcattgctgatatttgacaaatgttgacattttgccattggctttggatgttttaaaaataaaattttatagatactctaaagccctacacaatcctatctccttattgttttaatttgcattttgtggagagtgcctctataaaattaggccaactgtgcctctaaaactttgttgatatttaggaagctgccatgtagaagtctgtcttcaaaacatactttggttactagagttaaagcaatgatgctgcttggcctatacaatccccttggtttccttctatgcttgataatccacattttgcatgaccaccccaactattaaggtcacacctttctccctgggtcccagccaccttctgacgtggattttgcaagtctcaggtgatatatcagatgcctggaaacagtgtgcagccaaccttcatgggtagtcctttgggaaggacatggtttgaaataacaatgtggaaggctgcttcccagcctcaggttgctgctcagcatgttctggccttccacccagccctcctcatcctgtttcactcaagaaagggaacctggtgggtgacaatgtcaggaccaggtcatgactgcgatggttgccctgttcacagtccacacccctaccttccaggagctccttccacatcctgcccccttcctgagtacacctggctggtgtctccagggctatcctctgcctccttcctggcttatgactacagtgggctcacacttcactatacttctttgattcttaacttgaggtttaccttctagttctctcttcttctcccaacctctactctcaaaactcctgtcctggccatggtcataatataaagctttcccatacctgtaatcccagtactttgtggggctgaggcaggaagactgctggaggccaggagttcaagaccagcctgggaaatatagtgagatcctgtctctacaaaaatacaaaaattatccaggcatgatggtgcacagctgttactctagagcctgaaatgggaggtttgcttgagcccaggagcgtcaggtggcagtgagtcatggtcatgccactgcactccagcctgggcaacagagcgagactctgaataaaaaacaaaaatacaaacacaaaactttcccagaggagaacttgaactttacaagcttatcagaggatagggactttagcttttccatgatataagcagccaatgaggagtgttcttccattgcttttatgagatactattctagtgagtcctgatttgagagaactgagttcttagaaacttgaaatcgatgctttccactttctgaatctgctaatccaagtgaatgtctttaaattaacattcttttggaccagcatgacaacaagagcaagatctaccctggctctcacacccccacttttttgtgtcctttacaggtgtctttcacgataactcaactcaatggcacaaacttaacaaaagaagggatggcttgtttcaggacacctcccacttgagacaaattcatcctccagcctatagtatctcaaaaggtggaccctgctgacaagtggagtttctcccatctagctttcttggtacttgagcttgctcaatcaaaagaggaaggagagaagcaaagctttgggggaagtgagtaaggaggcaagaatttttcatattagagtaacaaacgtgtctccattcactcaagacttacctggttttagcactgaacattcatctgtcatcctgggaaaccctctagtcctgagcaaatcagagcagttgatcatcctacttcacataaaagagggatttttaaggtctaattgaaagtatttgacaaagaaaagaaatcttcaatattggaaaacttttgcaaagcccgggtggggccaaagcaatcatgaggaggggcgtagtcagagaaggaatatttatattggggactaaaggatgactcaaagttattaaggtaaaggctaggacgagagtgggaggccactcaaattcatgggaagcagctaaaaaacagcctttctattctgacatttttccattaacttgcagtgcatttggttaagtctatcccatcaaaataacataaaatctatgctacatcttttcttgggataataaacatttgataccttagtcccttgattttccagatccacattttctatagccaaaaccgaatcatatcttctttcaagaatacttcttaaatgcctgttgtgcgcacagaactgtgagaattgtgaagagtcttctggagcgcacttggaggttttcaggcgtaaatcagggatacatttggtcttatttcttctgaatttattacaaataatttcaatgtaatggataaattacttttaactaacccattccggaattttgtcagggtgagctagtctttattttgaagaatctacatttcccccatttgggaaatcaggacggtgtttccccattctgagatgtcaatcatgcttcccgtccttcataacttttcagagaaggcttcgagtcttcagtcacatctgcacatacctttcattttacaggctgcagtttataaggcccaagtcccttaaattcattaagactggcaagcagctctcttactagatttcttcccatctgaggcattacatgtttcatattcatggttagcctagccttccttctttggatataatattcctaatggagaagaaatgaacacaaagactttgaatagcattttcctgtcatctgttaatataatagcatttctccccaagtagtctgatgaaatgtgattaaaacaaacttgaaattcatttgaatgacttttatatttttggctctctgttttcgttttccagctctttttaaatataggctgagataggtgttagaaattggacaaagaaaaatgaaaatgtgttattaagggaatgaaagaaattacttataaatgttaaggaaattaattcttagtgggctcgtatttattgggtatatatgtcaagccaaaggaaatgtttgaaacaagatgaaaaagttatcaacaagatgcttttttctcctatgttctgaatcttgaagagttttgcttggtacataggtcaaactgtctggactgactctcctgattactgctcagagactccagagacaatgacagatcaatctgccgaaaaaggtgctacctgagatggcatttgcaagttctctctgcttccatataattctctagccaataaccatgcacttatttctcaattaacttaattcaacttaatttaattgagcaatgaatgcaactaaggtcgtgatttcagtattacaagtaaatggtgtggaatagaaagaaaatacttgtttcccataagggaaacacaacatgtacacagaattgatagtgtggtagaatgtgggtagctccatgtggcaaaggtcattagcccagggtacaggggagggcttctggggagagtatgatttgaatagaacttgccttaggttgttcagtagaatggtgacagtggaggttgttggaggggatttactgataggagagcctatgtggctaaaggcacggaggtagaaagctgcagagtgtgttccagctcgctaagaagtctagtgttttggaagcatctatgaacagggtttgcagaacttaggactgtgtggatccactgctgtcatcaagttcttctacaagtgtggctgctggccagcagcagcagcataacttgggagctccttagaaatgcagcgtcaggtcccccccacaccaagtgaatccaaatgttcatttcaacaagatcccaggcgatttgcatgcacattatagcttgaaaagcacttccttagatatcatctgtgttgtctctcatttattatctctctggtcatgtgacaagcacactttatctattgtaagttctaccagtactcacttccgaatcattaaataatgcacttaaggccgggcacagtggctcacgcctgtaatcccagcactttgggaggccaggcgggtggatcacgaggtcaggagatcgagaccatcctggctaacacagtgaaaccccgtctctactaaaaatacaaaaaattagccaggcgtggtggcgggcgcctgtagtcccagctactagggaggctgaggcaggagaatggaaggattcccgggaggcggagcttgcagtgagctgagattgcgccgctgcgctccagcctgggcaacagagcgagactccgtctcaaaaaaaaaaaaaaaaaaaaaaaaaaattgcacttaaaatctggatttcctgaagtttcaactttaataatgtaacagtcattattgtcattattgactcctcctggtgcaaagacgaagtgagcacttttcctttctttcagcctcccctggcctacttcctctgtcttatctttcagagttttaggactgtctgtcttgttctattattattattgttgttgctgttattttttaagacggagtcttgctctgtcacccagactggagtgcagtggcatgacctcggctcactgcaacctctgcctgccgggttcaagcgattctcctgccttagcctcccagcctcccacgtagctgggattacaggcgcccaccaccatgtccggctaattttttttttctttctttcttttttttttttttttttagtagagatggagtttcaccatgttctccaggcaggtctcgaactctgacctcaggtgatccacccaccttggcctcccaaagtgctgggattacaggcgtgagctgccgcgcccagcctagttctagtattatcattacttttacattctctattttttctttcaataattgtattattttcattgtttttatgaccacatttgctacagtcatttagacatggttctatatgtacatgaattagtcctgctatggtctaaatggttgtttcccccaacaattcataaatttaagtcctgaccctcaatgtgatggttttaggaggtggggtctttggaaggtggttagggattggtgcctttttcagggactgaagagaccagagttctcaccttccaccatgggaggacacagatagaaggtgccatctgtgagccaggtagtgaatcctcaccagacactgaatctgctgtcactctgatcttgaacttcccacctttccagaacactgaaaagtaactctgtgctgtttataagtcatccagctgataaagaaaatgtggcacataaacaccatggaatactatgcagccataaaaaagaatgagctcatgtcctttgcagggacatggatgaagctggaaaccattctcagcaacacaacacaggaacagaaaaccacaccgcatgttctcactcataagtgggagctgaacaatgagaacacatggacacagggaggggaacatcacacactgggactttttgaggggtgggggacaaggggaaggagagcattaggacaaatacctaatgcatgtgaggcttaaaacctaaatgatgggttgataggtgcagcaaaccactatggcatatgtatgcctatgcaacaaacctgcacattctgcacagttatccccagaagttaaagtaaactaaattcattaattaactaattaatttaaaaaattaaaagaaggccaggcacggtggctcaggcctgtaatcccagcactttgggagactgaggcaggtggatcatgagatcaggagtttgagaccagcctggccaatatggggaaaccccgtctctactaaaaatacaaaaattagctaggcacagtggcacatgcctgtagtcccagctatttgggaggctgaggtaggagaattgcttgaacccgggagatggaagttgcagtgagctgagatcgtgctactgcactccagcctgggcaacagagcaagactccatttaaaaaaaaaaaaaaaagaaagaagaaaaagaaaaaaataaaataaaaaataaaaataagtcatccagtctagggtaccttgttatagcagcatgaatagactaagacaagtacccattggcaagttctttatattatcactactctatttatcagctttgcatacttattcctctctcaccggcttattaccttcctgagcagatttttatggatgagtatgttggtcatatgctccctcggttggtgtgtatcatctcctttcacctggaaatagtagtttcacaaggaaggacattcttgtgtctcaagcttttactctcaaaattttctaaacatttcttattattttctggcacttaacattgaagaaaaatctgaggttggctcaatttctttttctttgcaggtaactcattcattctatctagatgatggtaggctttcttattgttgaaataacattgtcaccagaatatgactagtatatgaatatgctagcatatgaatacagtatatgactacactataactagtttgcttctttttgttaattttgggtaagaattggtgaattcttttgatacataagttcagattttccctgaattttagagagttttctttccataggtctttgaaaaaaaaatatatattttttgagacggagtctcgctctgtcgcccaggctggagtgcactggcgccatctcggctcactgcaagctctgccttccaggttcaggccattctcccgccccagcctcccgagtagctgggactacaggcgcctgccaccacgcctggctaattttttgtagttttagtagagacagggttttaccatgttagccaggatggtctcaatctcctgacctcgtgatccgcctgcctcagcctcccaaagtgctgagattacaggtgtgagccactgcgcccagccgaaaatatttttgcttcttttattttgtcctcttcttcaggaatgctgattatctatattattgaattgccactgtctaccttttatctgtcatataatttctgattacatctacctctgttctcttgctctgaattatgggagatttttttcaagattattcacatcatataattcaatttttgcagctttgttattttcatttttgcttctaattcctgctattgactctaaagtgtatctatatatattctaaaggttttgtttgtttgtttgtttgtttgttttgttttgttgtcttgttttgtttttagacaagttctccctctgtcacccaggctggagtgcagtggcacaatcttggctcactgcagcctcaacctcctgggcttaagtgatcctcccatctcagtctcccaagtagctgggtccacaccacaggtgtgcatcaccacgcccggctaattttttttttttttttttttttgtagagacagagtttctctgtgatgcccaggctggtgtcaaactcctgcacttcagacatcttcctgcctcagcctcccatagtgctgggattacaggcatgtgctacctttttctttaaatctcctgtaacaatttttttcttaacctaatcatcttgccatcttattttcagaatccacttgaaaaaaatcctgggtagctgtcgtttaacctttttttgattccttagggtaaatgttgccatgatttctaatttataatttgcatggcttgtgtttgctctgctgtttactgttcctttaatgtattcagatcaatgcaggtaaatcatttccactgaactgaatggcggatgctcttggggaccactcactatttacctgggcgctgtccttagagaggtagagatgggagctgagttcatgacatttccatcagaaggactgacttgcatactttattttctttgtgttcattggattagcagcactaggaacaagctttctctgcaagctttcctgtttggatgaacttcattatgtaaacaccaagtgggtttgtctcctttctcctccttgggagctgattattgtctcccaattctgaaaacacaatctcagttcgaagtgatccagttacttgttagctaaaggctctgctttccatagttgttctcactagttcgaggtgaagaaacagttctcagtagagtaattgccaaaggtctcctggtttgccctctcttcagacctcacccaacaccgtagaggacgttctctatgtcctcctctctcactcaccatctgtgcactccagagaaagcctaaactgtgtcagagaaaagccatcccacgagctttctttctaaccatgagcatggtctggggatgctgttaacacagcacacagttctcctacagcttatccacgaccttatttaagggatatcagctggatttgtcagaattttctgtttctcagaaagttgcacagccttctcaggcagggaagttatccactgattccttgtgtctttcttgagtttggcagagcctgctctttacccagaagtaagcatgcacagtggttggctggcaccaagcgtggttagtaccattcctttgtttctgccatttgttgagagttttggagctttccctttattgatacttctctctaatcattttggtcagtttctggggacagaggtttaaatgcccattttcttttcttttcttttcttttctttttcttttcttttctttttttttttttctttgagacggaatctcactctgtcgcccaggctggagtgcagtggtgcgatcttggctcactgcaacctccacctcccaggttcaagcgattctcctgcctcggcctcctgagtagctgggattacaggcgtgtgccaccacgcccagctactttttgtgtttttagcagagacagggtttcaccatgttggtgaggctggtctcgaactcctgacctcttgatctgcctgccttggcctcccacagtgctgggattacaggcgtgagccactacccccggcctaaatgcccattttcaattcgctcacctatttcataagtatttagagtgcttaataggtcccaatcactgtgaacgggtctctattatcttaagctattagctgtcagatacaaacccactctttgtgaccctggatgtacagtcctgacagtgggctcccactaggctctgccaacagggaggactagggggagcttggaagaagaagtggaagcccatgtcttcctgtttgcttctgcttttttttttttttttttttgagacggagtctcgctctctcgccaggctggagtgcagtggtgcgatctcggctcactgcaagctccacctcccaggttcacgccattctcctgcctcagtctcccgagtagctgagactacaggcgcccaccaccacacccggctaattttatttttttgtgtttttagtagagacggggtttcaccgtgttagccaggatggtctcgatctcctgacctcgagatccacccatctcggcctcccaaagttgctgctgtttttgttagcatcgccaaacaatggtttttaccctacagttagtaccaactttgcccacacactccccaaaccagcctcatcttgctctccactcctgtcctccctcccttcctcctactaggagataacagctccagctagctagcatggccatggctctaggtccctcctccaagctgaatgggccgctcttggaggctgctgaggcaccagcaccagccaggaaatatcctctgcctggcgatctggtcccagctctgcagggcgcctcccacagactacgagtttcttcttttcttctttctagccttagggtggtagctgcttcccacggttactctacctgtgccatctcagtgttgccgtcttggtcttttcagtcctccaatgcctacttatccaattccttgtattaaattccttctgttaaaattactggtgttggctgtttttcttactagaccatgactgatgcaaagatagagcaagcccttacagagtgtgtctgtatcagtccagtaaaggatacagacaataaaccaacaaatgcaatatgacatgacaggtgctttggaagcaatgaaggcacagaagagggaaacctacacttcaggggagccaagaattacttcaggggtgacatagcatctagctgatacctgcaggtaggtaggagtttcttatggaatggagagagtaggaaagggtgctttggtaaagtcccaagcaagagagaacaggacatgtttgagtcccatgggtaagaaaatcaggaagtagttgagacccaaaggtaaaagagcatatggggtgattgaatttattttactgtagtgcaggagcacactgtgtgaacactgaggttgagactggcagatggtaagtctggaaagttaaaataaatgatgccaaatcaggagtaatctccctgtaagtcattttaataagattgaggagctggctgcggtgctcacacctgtaatcccagcactttgggaggccgaagcgggcagatcacgaggtcaagagatcgagaccatcctggtcaacatggtgaaaccccatctctactaaaaatccaaaaattagctgggcgtgtggcgcgcacctgtagtcccagctactcaggaggctgaggcaggagaatcacttgaacctgggaggcggaggttgcagtgagctgagatcgcatcactgcactccagcctggcgagagagtgagactctgtctcaaaaaaaaaaaaaaaaggataataataataagaagaagactgagggcaattgggagccactgaagagttttgagcaaggaagtgacttgattggatttgcattttaggaagactgatttgatggattggaagaagggatgactggagccagggagactgaatagggagttcctccatttctctcttcagcatggataaggtagggatagagaaaataggtttgagggacacaaagaagttaaaaacaacaggatttaggtatcatttagatgaagcaggtaaggcaaagacaggaaacagtgattcattcacttgataaatatttcttttttgagaaagagagagagacaaggctttactctgtcagccaggctggagtgcagtggcatgaccatagctcatgacagcctcaacctcttgggctcgagtgacctgcccacctcagcctcctgggtagctgggaccacaggtgtgtgccatcttgcctggctaattttcttgattttttgtagagatgaggtttcactatgttgctcaggctggtctcgaactcctgagctcaaggaatccccccaccttggcctttcaaaatgctgagattacaggagtgagccactgtgcctgaccaatatttctttatagatagattgataggagggtgcagtggctcacgcctgtataccagcactttggaaagccgaggcagacagattccttgagtccaggagttcaagaccagcttgggcaacatagtgagactccgtttctaaaaaaattttaaaaatactagtcaggcatggtggcgtgcacctgtagtcccagctacttgggaggttggggcacaaaaattgcttgagctcaggagatggaggttgtagtgagctatgatcctgccactgcactcaagcctgggcaacagagtgagacccagtcagaactgttatagatacattaataaacagatgacactaagaattttagcttggagaacattatggatgaagtggtgctgttcacctgtctgatgtccgagatgctcttaactcatgctcttaattttatcatttattcttatctctagcaattctatagcctatggaactctggagtgcttcctacaaattacactgattcttagggacactcttcactattctcaagttttttttttttttaaacttgaatattgtctttgctcttcaccatgttgaacaacatgagaactaggacattctcttcaatacttataaaataatgtatgttcacaaagactttcctgagcaaggaaaatattattgaatatcatatggatgaaggatttatatcattcatgccacaataagcaactttaaaacctctgttagatatctcagttctatcaaatctcagttaggtaataccaacattaaaggagtctttatgtctaggattttttttttttttgacggagtttcgctcttgtcacccaggctggaatgccgtggcataatctcggctcactgcaacctccacctccagggttcaagcgattctcctgcctcagcctcccgagtagctgggatcacaagtgtgcaccaccatgcccggctaatttttgtatttttagttggagacggggtctcaccacgttgacaggctggtctggaactcttgacctcaagtaatccacctgctttggcctcccaaagtgctgggattacaggcatgagccaccgtgcctggcccgccaatgctgtttgagctaaagtgatgagcaccacttccaagcctggtctctaaaaatctcttaacgcatgaatctcaatgttttttgctcttccattggcttgaggcagacaagcaagtaacctcggaagtcacatgttgaaaaaaggtgagtcacaacatggaacaaacctgggtgtcattacatcaagaagagtcacctgccagttagagtcacccatattggatttcatgtgagtatagagtaaaattattttgtgttaagccatagagcttcaatggttgatctgctacgggacctaaaatcaccttaacttattgaccatacgagctggcgtacatttgtcatcacagctaactgtttctagaaccatgagaacaaggcctagttcagatacatttccatggctgtatgttttgagattccatggctaaattggggttctagtacaagagtggctagcaaacctgccctatgaggaaatgaaggggagctggatgtgggtgtctacaagtgtgcctttcacagatacttctttcaactggcaggcagcctaacgcctaattgtccaacctaccatcaggagactccaaacataggaaactgtttgtactggtgggcacccttgcaggtcttctctgacctgtgtccagtttacatctgcctgaccattgtcctgtgatggcagctcgacctcgtgttctctccagtgtcttggggacaacttggcctgggccagcctctagttcttgagttggaaggcacaaattcaatacatcaccacaataggaaacaaattcaaatatttctacctacagattctgggcagggagagcataattaatcgggagggcagtcctgtgtccccagcttacagagggcaggaatgaagagtcaggcagagaaggagagaggaaaaacgtggcaactggcagtatggataaggggataggatgtgggtcactttaagttcgtgggcaaatgcctgaatagtccctttaaaggaagtgaagcagcagaaaagtagggagcccagtgtggtaggaagcagagatccctctaagttcttgaggctggcctccagctcgagccatttgggtgtggcgtagaactggaaactgtccagggtgactgagcctgcttctggtatgagaaagctaaacttgtattcaaaaaatggacgccaaggcaacataaaattataagaattcactatagggctgggcgcggtggctcacgcctgtaatcccagcactttgggaggccgaggcgggtggatcacgaggtcaggagatcgagatcatcctggctaacacggtgaaaccccatctttactaaaaatacaaaaaaattagccgggcgcagtggcaggcgcctgtagtcccagctactcaggaggctgaggcaggagaatggcctgaacccggaggcggagcttgcagtgagccgagacagtgccgctgcagtctggcctgggcgaaagagcaagactctgtctcaaaaaaaaaaaaaaaaaaagaaaaagaaaaaagaattcactatagtatgagggacggtggatgaaaggagaaaaaaaaattgcattaataaaacttggtaagagaatagcagggacatggcaggacattggatctcaataatgtgtatttgttattcacacaacaggtttcgtatctattatgtgcaaagcattatgctagattctgtgataactacaaaaacttagacattaaattaaatcacagactaaattaaaacccagtagagaagacataaatctcgacataaatttttaatataaaaaatttatgtcattgcatgcatttatcaaagtattattttaaggtgattgtcaactaattcctaaatgttaaatgcaactttatcatttgagccaatattatttcagataatggaaagcatttatattttatttttctaagaatttattttacccaccagactagctattaataataagtcaggctgggtgcggtagctcacgcctgtaatcccagcactttgggaggccaaggcaggtggatcacatgaggccaggagttcgagaccagcctagccaacatcgtgaaactttgtctctactaaaaatacaaacattaggccggacacagtggctcatgcctgtaatcctggcactttgggaggccgaggcagccagatcacatgaggccaggagttcaagaccagcctggccaatgtggtgaaaccccgtctctactaaaaatacaaaaatcagctgggcgtggtggcgtgtgcctgtaatctcagctattcggggggctgaggcaggagaatctcttgaacccaggaggcggaggttgcagtgagccgaaaccgtgccactgtactccagtctgggcgatgagtgagattccgcctcaaagaaaaaaaaaatacaaacattagccgggcataatggcaagcacctataatccgagctactcaggaggctgaggcaggagaattgcttgaacctgggagacagaggttgcagtgagccaaaatcacaccactgcacaccagcctgggcaacagagcaagactccatctcaataataataataataataataataataataataataacaaatcaaatagacaatttaaaaaatatatacatataacatatatgtgtgtatatatacataagtgtatatatatatatatatatatatatatatatacacacacatatacacatcttttgggatataggcattatcacatcactgcacagatccataatttataccatacctattttgtgactgggaacaaaagtgggcaaaaagaaaaggaaaatacattgatgttgaggagctcaattcagtctgtggataaagagacagaggcacaaggtttaagtgtgattgtggcattatagaatgcttaggggttcaaaatgaaggcaatatcactgtgaagtagaaacagctagtagacactccttgtgtaaactaagcattgaacaagctttttgaacagttttggaaaaggtcttccagatggggaaactggacactccctgaagaaagaaccatgaggaaagtgtgtttgttatcgatctaatctggagcttacaagatacagacattctctacctgggagaataacagctcctgtttttattccaagcaccataatgcatgtctaggggcatcccagacaagatgttactggcttccacccaagagtttagcctcctggaaagagtggtttatggagaggagatctgtgttccagttgtgtatttacagcttctctttcatgtgactaggaatatatggtgtgaggactcagatggtaaatatgtaaagtgtgtttgcttattttaaataagtaggaggctgcacctgattggatgttatccctggtaaaagaaaaacttcagctgaattagatttaaaagagtttaattgagcaaagaatgattcgtgaattgggcagcctcccgagccagaatgggctcagagactcccacacagccacgtggtggaagaagatttatggacagaaaaaggacagggatacgcagaaaatggaagtaaggcacaaaaacagcaggattggttataagtcggcgtttgccttatttgaacacggtttgagcagttggtcacatttgattggccaaaacttgttgactggcacaagtgtaggctacagtctgtttacaccttcacttgttatagttcacgatgtacagaaaaacctttaggcagaacttaaaatatgtaaggagacagcttgaggctacacttgatttaacactcctttagctaagtctatagagctcgtgaatgttagggctgattagattttatgtgaaaactggccaagtgtctgttttgtatcctgttggcccaggagtcaaacagacagcttgctcatttgctcaggcagtggggatcccgagttgggatttgagttatgtttataggaagtattctgaacagttgagattaaagtgcagcctccatgtcatccatctcaaattaaatccccaccctagaatagaccagaactgcagcctgaccacggttgttaaacttgagatgtgatattgaggtctgtatctcagattcaaaagggaagttataacggctactctgaggccagctctttttgctttggaaaaggtgaaaaattgccatggaatctcaaagcatgcatgtgagtattcttaagagattagaacaaatcattgcaaaggtgagtgtatacaagaaaacatgtaagtcctaataggagttagcatcctatcctataattttcatgtcaccgatgttcaacatgaggcaaagcaccacaaactatgcagatgacacactggatttatggaattgtatttccacccatcagagtcccagcaggaaacagaattcagtgcagatggtttaaattaaaataaatacataaaaagaccacttccagaggggtaggctgggtacagggggcaaataagggataaggaggtgtccagagaccagcaacagtgggaagctgtcacttcccctagggctggagcaatatagggagaaaagggtgttcatggactctcaggacttggacccctggtggaggaggaaccactctgtgagagcaacagtcatggagaaaggccaaagataaagtaccaaagctgggaagcagagagggagatgggcctggtctctttccttccctttccaatctcctgccaatagtcccattggctgaacccaaccagaaaccatctggaaagagagcctggggtgatagaggacacagggcagagtgcagaaggatagaaaatggatctactggaggtttggaggaggaattggcagatgaaaaaatcacaacacagggctgctatctgatatgaagttctgcttttaaaaagaaaaactcagtcatctctaatgtgtgggtttgggacaaattattccagcagaaatatgctaggaaagatcagtcagtaggaaatcgcagctcagaaggaggtccatgtgaggaccctagtctgaccctgcagaagcatgggctggcacggtgcttgtggaggaggtgctacaaagggttcgtggccaggcttctgacatcacacatgacctatctactacagctaacatgtcgttatttccacgttggtccactgccctgcttggcagagtcataaaggattctcctggcatgcatctatgcctggctcactgcccttggtactagggttgaggaaagctactgaaagtagaggttactttcagtaggttggtaacacttgactttccttctcatgctggaaagctctttaaataggtcatgtccctcacggggtcacaccagtttgtccattttgtcagaacctaaggagaaggcaaagctcattttacttgcacacagaggaccttagtcttcctggaaaagttctcagcatttgtagaggccactaagcatgtaatgctccatccttcgttcgtctccccaaaacagagcaatgtgctactcttgggaggttagaatcctttaaaggtatttttctctgcctccaaattcatggatataaagccatttctaccactttaatatctctctttctgtccacatttccactgtcatgtctatcctgaattgttacagtagcctcgtcactggtcttggcatctctggtgtgccctccacctctttttccatgctgtaacttgagagatcattctgaaatggcaagttccattgagtcagggctttgcttaaaactcttcaatcattcttcattgccatcaggaaatgtacaaaattcttataaatgttttaccgtctggctactacctacccttattctcatcattctccagcatcagctctccacccagcaaacacacacacacacacaccccacacacactcaaccactacacccaatcccattgatctccaggtttaggttctactgatcatcccacactcttctttaagatatgtggcctcttgtattttctgatttggagataccattgtggagagacccatttcacacctctgggttttctttaaaagatcttggaaggaaactgcctgaaatgtttgctacaaatgaagtgatcttctcattagtttctttctttcttttaatcatccgaaaaggagtcttgtaagtcatgcttaggattcacttagagacgcataacaatgaagccagtctcccaatttagcaacgctcctgggatttctccatctcttactgcagggtacagatgctatgcctgagatcagatacccaagtagaggcctggaaaccagggctgtcttgatgattacttcaaagtgggatggggaaggccagggtaaagtgatgtgttcacggagacttaagaactaccagaaaaaggaagtcagaatgttgagacactgggtttacactgacattttatttgactatgattgaatatgtaatcagaaagtaaaagttctccattaaataaagccactcattggtttaaaggaaaaattatttgggagcctcaacaaatttgtaattattagtgttactattatttttgagatggggtctcactccatcatccaggagggagtgcagtggtgagagctcaactcactgcaacctcagcctcccaggttcaagcgattctcatgcctcagcctccccagtatctgggattacaggcacatgccaccgcgcctggctaatttttgtatttttagcaaagacagggtttcaccatgttggtcaggctggtctcaaacccctgacctcaaatgatctgccctcctcacctcccaaagtgctggtattataggtgtgagccaccgtgcctggccgaatttgtaaatatttttaaaaagacaaatacaaaatcttttggggaaaaattctgttctaggtgctgggaatagagaagtaaacagaaggagacagtttctgtgttatgagacaggactgggagaaaataaatatatgaacaaaaattatacaatgtccagtctgttcatggtaagagcctggatggaaaataaagcagaagtaaaaaggcattgtgtgagggggcagggtgcctgtttaaaagggatgatcaagaaaagcctctttgcaaaaatgaagcttttgcaaaggcctgattgaagtgaagaaggaagccatgaaatatttagtaaaaaagcacactaggaaaagaaagagcaagtgccaagatcctgaaatgctcaaggaacattgaggaggtcagggtggccacagtgccatgagcagaaatgtagaacacaagatagagaagaagccggagtggagatcccacaggccttagggaccctggtaagggctttgaatgctactgggtcaaggaacgccattggagaatagagagcagggagaatgatattttcaaaggattgttctggctactgtgtgtggaaaattgactgtctgtcgggagaaggagagtaccagcaaggacatcagtagggaagatattgcaattgtcctgcaagacatttaatttaggttggaccaggatgccaatgacatagaatatgaggaatagtttgattcagaatgtattttgaaggtaggttgctggtaggatgttctgttgaattgcatgagggcatgagagaaagaaatgagtgaaaaataatccaagatatggaacacaacaggattcacagaattggagtgagaattgagaatagactttggatcttttaagtctcagaaggctgttagatataagtatagaaatgttgactgggcagttgtatattcaaatctggagtttgagaaagagactaggactagagattttaattcaagtgaatttaggctatgtataaaatgaaaatcgattgggtgcagtggctcacgcgtgtaatcccagcactttgggaggccgaggtgggcggatcacgaggtcaggggatcgagaccatcctggctaacacggtgaaaccctgtctccactaaaaatacaaaaaattagccaggtgtggtggcaggcgcctgtagtcccaactactcgggaggctgagacaggagaatggcgtgaacccgggaggcggagcttgcactgagcggcggaacttggcattgagccgagatctgtccactgcactccagcctgggtgacagagtgagactccgtctcaaaaaaaaaaaaaaagtgaaaatcatgggttttaatttctaaaatatttagggtactttctttaagagaatagaggaggtccaaagtgttagattgagaagaagaagataatacagcagaagagactgataataaatggcaagcatgggaggaggaaatatatggccatggggaactctggaagccatgtggggaaaaaaaaagtttcatggaggagagagtcaagaaggatggcttgagctggccgtggtggctcatgcttgtaatctcagcacttcgggaagccgaggtgggaggatcacttgagcccaggagtttgagacctgcctgggcaacatagggagaccctgtctctacaaaaagtaaaaataaatgaaccaggcatggtggcatgcacctgtggtctcagctacttgggaggctgagctgggagaatctcttgagcctgggaggttaaggctgcagtaagcatgatcacgccactgcattccagcctgggcaacagagcaagatcctgactcaaaaaaaaaaaaaaagaaacgaagggaagggaagggagaaacagagaaagaaggagagaaagaaagaaagaaagaaagaaagaaagaaagaaagaaagaaagaaagaaagaaagaaagagagagagagaaaggaagaaggaaggaaggaaggaaggaaggaaggaaggaagaaagaaagaaagaaagaaagaaagaaagaaagaaagaaagaaagaaagaaagagaggaaggaagaaggaaggaaggaaagaaggaaggaaaatggttttatcatcatctccataaggatggctattattttaaaaataacaagtgttgacaaagatgtgaagaaattgggatctttgtgcactgctggtgggaatgtaaaatggtgcagtcaatatagaaaacagcaaaaagcttcctcagaaaattaaaaatagaattaccatatgatccagaaattaaacttttgagtatattcccccaaaaaattgcaagcagggacttgaacagatatttgtgcatccatttcatatcagcattgttcataatagcccaaagttggaagcaacccaagggtccatcaagagatgaatggctaaacaaaatgggatgtatgcatatcttatgagatagaaaaaacccaagtgttctttctaatctcttacacagtctcttaacacaacactctgacattggatgtgtgggggtttgtttccaacacaccaagcaattctccagtggataccagttgagtgtcctctaattcaattcaattctgacactatctacctggtgacagtgtcaggtttcacgggttgatggcccatttccacaagacttcccaccattgcaggtgccagtctgaagtagtacgttgtcacttcttgtaggttgatgcttctgatctatatatcaaaggttcccacaaccccctcctctgatttgtttaatgtgctacagcagctcacagaattcagggaaacacttcacttatgtttacccatttattaagaaggatactgcaaaggacacagatgaacggccagatggaaagcatgtggagggcaagggatatgggaaggggtgcagagttttaatgccctttctgggcaccacccccaggaacctccatatgttcagctatctggaagctctctaaaccctgtccctttgggtttttatggaagtttcattatataggcaggtttgattacatcatgggccattgatatttaatttaatcttcatcctctctccctttcatgtatgtatgtgtgtgtgtgtggtggttgggggaggtgagacactaaaagttctaaccttgtaatcataccttggtctttcaagtgaccagcctgaagccatataggggcccccagccaccagttatctctcaaacacactaaagacactcttatcacacactccagagattacgagggttttaggagctgtatgccaggaaacagagaagaaaatcaaatatacatttcccaatgtcaaaaattaaatggaatattatttaattttaaaaataaaggaaattctgacacattctacaatatgcatgaaccttgaagacattatgctaaatgaaatgagccagtcacaaaaggacagatactgtaaggttccacttacaggaggtacctagagtagtcaaattcatagagactgtactaatttgttagggctgccatgacaaaatagcacaaagtgggtggttaaaaaacaaaaagttattttctcacctgctagaggctggaagtccaagatcaaggtgttggcaggtttggtttcttctgagacctgtctccttggcttgcagatgggcaagccctttcctgttgtgtcctcactggtcttttcctctgtgcatgagcatccttggtgtcccttctctttcttatgaggacaccagtactactggattaggaccccaccccaaaagcctcattttaacttaatcacctcctctaaaggtttttatttcaaaatacagttatagtctgaaatgctgggagttgagacttcaaggtaagcatttgagagagtagacaattcagcccacaacagaaacagaaagttgaatggttgtatccaggtcctgggagaagggagaatggggagttattatttaatggctaaagtgttttagttagagaagatgaagaaaaaatttctagagatagatggtgcttatagttgcaccacaatgcaaatgcccttaataccactaaactgtacacttaaaatggctaaaagtgtaaatttcatgttacatatatttttatcacattttcaattaaaacagcgtggttctttcaacaaatgtgctggcacaattggatatcaataataaaaataaacttggattcttatctcataccatacacaaaaatcaactcaaatggattatagtcctaactgtaagagctaaagccctagaaataaaacataggagaaaatctaatgactttgagtgaagcaaagttttcttaaatacaacatcgaaagaacaatccataagagaaaaatttagtacatttaacgtcaaaattagaaacttctgttcttgaaaagacactgttaagaattttttaaatcacagaatgaaaaaatatttacaagtaacatatctgaaaaggatttgtatccagaatgtaaagaactcctataactcaataataagaaggcaaacaacccaattaaaaatgggcaagataattaaatacacatttcatcaaagaagataaatgaataataaacacatcaaaaagacgcttgatacaagtagttcttagggtaatgcagttaagagtacaatggagatgcaattattatacacctcctagaatagctaaagtcgaaaggattgatcatatcaggtgtcagaaatgctgtgaagaaggtgaaatcctaattcagtgctggtgggaatgtatagtggaagaatcacttggaaaacagtttgttagtttcttcaaagttaaatataaatttaccaatagacccatcaattccactcctaactattcacccaaaagaaatgaagttatgtccacacaaaaacttgtaggagtatgttcatagcagcattatttataagagctgtggaagcaatacaagtgttcatcaactggagaaaagagaaacacaatgtgacatatttacataatgaaatactatttgataataaaaaggaacaaactaccgatacaggttacaacatggttgaacctcaaaagcatgatggtaagtgaaaaaagtcagatacaaaaggccacctattgaatgactccatttatatgaaatatccagaaaaagaacatctatatagactgaaaatcagtggtttcctgggccaaggtgggagtagggattagctacagatggttatggagaagttttttaggggataaaaatgttctacatttgagttatggtgatggttacacactataactaaaaatcattgacttgtacttttacaacaggtatttttgtggtaggtaaattatacctcaataaagctgttaaaatttatttttgaaagacaaaatactgtttattaaatgctactgtgagacaaaataggaagggggctgagaagaggatgtgaaggtcattagtgttacttttaatattaataaatgaactttccttcttgataaacacatgttcactgtattagtctgttgttgcattgctaaaaagaactacctgagcctgagtaatttataaagaagagaggtgtaattggctcatggttctgcaggctggacatgaagcatggttggggaagcctcaggacacttacaatcatggcagaaggtgaaggggaagcaggcacgtcttacatggctgaaacaggaggaagagggtgaagggggaggcgctacacacttttaacaagatcacgtgacaactcactatcatgagaacagcaagggaggattccactcctgtggttcaatcacctcccacgaggccctttctccaatattggggattacaatttgacatgagatttgggcagagacacaaatccaaaccatatccttcacatctgaccacttagaaagtacagatcattcaaaaatgaagaaattacaataaaagcccccatagtgcaaagacaaaccctgctaacattttggccaatgcaccttcaaacttttgtaacattttggctgatacattttcaacttttttaaattggaaatttattttgttgattcatgataaacgtacatattttcaggggcatatgtgatatttaatacattcatctaatttgtaaagatcaagtcagtgtatttggaatatctaccaccttaaatatttgtctttatgctattaggttggtgcaaaagtaattgctatttctgccactgttaaactaatggaaaaaacagcaattacttttgcaccaacctaatagaaactttcaaattattcatttctaactatgtttaaatatgcaatagattattgtaaactatagtcatcctattgatctaacattcagtcttatttctatcaaactatatttgcacatttgcacccatataatcaatctctcttcatcccgtcttccctcaacctttcccagcctctagtaaccaccaatctactctctgttttctctgccactttttcagcttccacatatgagtaagaatgtgcaatatttgtctttctgtgcctggcttatttcatgtaacataatgatctccagttccatccatgttgctgcaaatgacagtttccttctcctcctcctccttctccttttcttttcttttctttttttttttttttgagatggagccttgctctgtcgtccagtctggagtgcagtggcatgatctctgctcactgcaacctccgcctcccgagttcaagcgattctcctgcctcaacctcctgagtagctgggactataggcatgtgtcaccacacccggctaattttttgtatttttagtagagatggggtttcaccatgttagccaggatggtctccttcttctttatggcaaaaaagttccatcatgtatatatacattttccttttccattcaaccattcatgagcacttaaactgagtccgtattttggctattgcgaataatgctacaataaacttgggagtgcaggtatcttcctgatatactgatttactttcttttggatatatatctagtagggaaatcgctggatcatacggtagttctagttttagttttttgaggaccctccatattgttttccatagtggctgtactaatttacatccccaccaacagtatacaagggttctcctttctccacatcctcgccagcatctgttattgcctgtattttttataaaagccattttaactggggtgagaggatatctcattgtggtcttaattttcatttcctgatgattagtgatgttgagcattttttcaaatatctgttggacatttgtatgtcttgttttgagaaatgactatttagatcttttgcccattaaaaaaatattactttttgtttgtttgtttgcttactgagtttgagctccttatagattctggttattaactatattgtcaaacttttatgtaaaaggagaatagaggctaaccatgtatatatttttatatatatatttgttgtatgtttatcatatatgctataaaggatatacatgtttattatatatactatatatgcttacaacaaaggagaatagaggctaactatatatatacatatatgtatatttgttatatatgtttattatatatgctataaagtggcctctggtagtatgtaaaaggcctgggaacaggaactctttgggaaaagcccccgttgtcaaactatctgccaagaattggcaacaataagtaaacaatggaaatgattagcttctttctctttatttccaaatcatttgtcagttttcccaacaccaccttgttaaataacctaccctttacctactaatctgaaatgccagcttcatcatgaaacacattctcatatgctctggatctgttactgggctttgtactttgtagccttccttgatttttattcacatattgtaaacattcctcattatcaacaaatgtgtgtttcttttcctttttttttgtttctttttttttttgttgttgttttttgttttgttttttgttttttttttgagatggtgtctcgctctgtcacccaatctggagtgcagtggtgcgatctcggctcactgcaagctccgcctcctggtttcaagcaattctcctgcctcagccttctgagtagctgagactacaggcgcccaccaccacacccggctaatttttgtacttttagtcgagacggggtttcaccatattggccaggctggtctgcaactcctgacctcatgatccgcccacctcggcctcccaaagtgctgggattacaggcgtgagtcaccatgcccggccaacaaatgtatatttctataacattgtttttaatagttcactgtcagccattgcatgtataatcaacatataattaaagtgtactttttgtggcaatttactttaaattcttcaatacaaccagtgtgatatgtgtgagaacaaaccaatatgaacccacatcttgggcctggccaattagcataagagatgtcctgatatgaaatatcttcaggttggctaaactgggtaaggaatgttagaataagttttgattgggccaggcgcagtggctcacgcctgtaatcccagcacttcgggaggccgaggcgggcagatcacgaggtcagatcaagaccatcctggctaatgcagtgaaacctcgactcgactaaaaatacaaaaaattagccaggcgtggtggtggcgggcacctgtagtcccagctactcgagaagctgaggcaagagaatggcgtgaacccagggggtggagcttgcagtcagccaagatcgtgccactgcactccagcctgagcgacagagtgagactccgtctaaaacaaaacaaaacaaaacaaaacaaaacaaaaacaaagaaaagaatgttttgatttaagtagacttgatcagtagtattgaaggtttgactgggtaggaatggttaacaggacccactgccctctgtgaatataatataaaacagttagtttcaacagtttatgcttccactgtggaagatcctactgccttgaattctactccaaggacagccttaagaacataattgcattgtcagcctttcagacaaagtgatggtaggggtagttaaaggtgtaaaaaaagcaaacaaccaaagaaagtttgtaactgtgcatcttcttacaatctctgtacattagttggaatttgatctaagacttggttttattactatgtcaccacttagggaggctgtaaggactgtatctctgctccctgcctttcactactagaggctacccaattcacacacccacccacccaaacacacaccccacaggatcatcaaacaaccaaattggtcttgagttggtttaacacggtccacacacagttatagagttgggcaactctatagccatgagctgagtgccaattgatgaaagccagggtgctgctggtgcctccaatgccagagctgtgtgttagtacaaaagcctggcaccagtccctcctaaaactgcagaggaagtctgtctccctctctctcacacacaccagagttgtcttcaagatcgctgctccccattcctctctagctggagctagagtccagcatttctatccgctgacctttaaagcctaaagggatggacaagggcagagcctccgtaactaccactcctactgaagcagctgtgtccccagatgttgtgaagtgttctaaaagaaggtggtcatgcataaacattgagttattctaggtagctcttcgtggcctccaatagtttcaggtaggtggcaagtagctagtcttacacagtcttgttcaccagggtctaacgaaagagaatctccaaccaaaatctcatatgaggtgtttattagacaaaaacaattattaacaggagggcacacaggcaattcttataacctgctgggtcagctcagtgaagtcctgctctctggtgaccttccacaaaaggctcacttgaggcagacccaacaatctggatgcagaattcagttaactttatagctggtatcagggaaccagagtcctccaaaattatggctgttcatggaacttttcagatgcacgcattaaaaaggtacacattaagattcttgctagatattatataccatttatgaaaagttgggaaggctttctaaaatattttagccaattcatatttttggaacaccatgatttcaccaatgaagatccatttctagcacttgtgatgctaactagtattgatcaaagatattgatcagaaacaaagacaactgaagccttctgatagccctctttggtgggtgggctttccaactacaatgctagcttaccactcctatggtgtgcattcttgagttaagcaactaagcacaactatggtaccatcaatcacacacataactaacattccttatgctgaagtactcttattttacgaatctaagatgcaaagattttaagacacactttttttttgcatctctggagggaaaacattgtcaaatataattttactgcaccattgactgtaagatatacccaggtatcagaaatgttaaaatgtgaaacaaaattgtgtgtcttagaattgaggatatacctaaaatgaaattataaacatcataacagtgagcctgtgttagtctgtaccgaggcatgtttacatgttgttttccttaaggatgtaagttttttccacgtttggcttctagccttcaagtaaaatccagcttcctgttcccacttttcttatccttaaaaaaatttctctctgtagggctccatgtcatctggcctattttaatgactttgaaagtaagatgcagtgtttctcaaagtatgaactgtgaaacgccctgcatcagaatcagtttggttgcttgttaaaaacatggatatcctgactccacttggagcaagtgaattagtattcctagaggtggtaccagaaatttgcattttaccagcccctccaggtgattccaatgcataccaaggtttaagaacaactgtcctaagaaaaaaacacagcaataaaatgcccttttacataaaaagagagaagaaatattacatattggtcactaatgtagagcatgtaacacaccttgcaggacagggatgataaagtgaggcagagactggttatatgttcaccaaacccattttcttcttctggcaacaagccaaattccattcccagccttcctggcagtggtaggaggatatgctattgagtactagccactgaaatgtgggtagaaaggatattggccacttccagtgttggattctcaatctccttcggtatcctgcagacatctatcctctttgttctttagccctcagaaaacagaagatgtggcagcttcttagtttatagtataaatgaagatgaaatggggtagtcgagaagagaaaaatcctatttgccaagagcttcaccaaatgaaaagcaaaaagaagatactttcaaagggggtatgccatttgggcatgcttagggtcttagtccattcaggtttctataacaaaataccttagatgggataatttgtaaacaacaaaaatgtattactcacagttctggaggctgggaaatccaagatcaaagtgccagaagattcgatgtcggtaagggcctgttcctcttagatggtgccttctatgtgtcctcacatggcaggaaggataaatgaactccctcaggcctcttttataagggaactactcccattcatgaagtctctacccttgacctagtcacctcttgaagttcccaccttttaataccaacacactagagattatatttcaacttataaattttgaaggacgcaaacattcagaccaggggcacttaatcatatcattctctagtctgccaatggatgcatctgtccccacttatgttccactcaggaaatgtacttgctcaagagactttcacaataaatcaaaccaggaaaattatttatcaggcagacagcgtgccagagaagggaagtctttgtgctgcagaaaaactgacagtgacctttgaaatccttatgcagtttgtccaaaaaactccagagtgtcctaaagaatggagtaagttaagagagataagataaaaattcagaaggaatataacacctcaagaaaaatgaaatttttgggaaagattctgaagagaattgtaggggcactctctttagtagagggagggctgttgttcacctgctagatacaggtgtgtgctggttaattatacttagttccttgatagactgatactgcattggttgcaatatctgactggtacgtgccaatgacacaaggaaacaacagttgttaagtattttgagtatccttcctggatgtggggagagggtgtgcagaggcaatggaaatgctgaaaggagcaccatgagaatgctcagggagtgttaaaggcctttatgaaagcgtgattctagaaagtcatcttgtttagtgatggtgctattcctgaccttgtcaacctatatactcaccctccttcagctcccatgctgggggaatccaatatctagtttcatgctatcaaatgcatgcagggcagtgaactaagagggttataatataaagacttcttggtttttgaaatatgcagccatttaaatcatcaagtgaagccagatagcttaatggtgattattctttgcaattcctagaaagtagcctctggtagtatgtaaaaggcctgggaacagggactttctgagaaaagccccagttgtcaaactctctgccaagaattagcagcagtaagtaaaagatggaaattattatttttttctctttatttccaaatcatttgtcagtgttcccaacaccatttgttaaataatctaccacgtacctactaatctgaaatgccgccttcatcatgaaacacattctcatatgttcttggatctattactgggcttagtttattcctccttattttctgtgaagtacagagtttgaaatatatcttttaaatcaaactaattaattacacattttagctttttaaccttttatattttgcctattgatctgtcaaagacttaaagaggtataatatgtttcctgccacgattctaattctgtcaatttctccgtgaatataaactattttgctattacatattttggtgtaaaattattctccagataaaagtttgtgtcagttatatattagctgcaaattataacttttatcaaaacaaaatgaggcttccagtttaaaaaatcatagagaaaatgtgttttggtttctgcctcttctcgaaatcgttccaaagcaacaaagagaaactgaaacctaaattccatctttggtgaaacccgtagacatctccagcccacattacagtaagtggagaaggaaagtcaataggcgaatattaaatgactcagcaataggagaaaggccaaacttacttatagtggagggggaaactgataagaaacaaatcattatgcttggccaggtcctggaaagctttaggaattggatgctccaaatgccaaagtcagaggtatggtagagctgataacgagggggttatttgaaagtctgtacaaaaagcagttatgtccaatattctctgctctgcctaccactatcctgcatagtcaggcagttactgccaatataaagcaagagacaaatattttaaaacatggaaccagagagcctgtaaactaagccacgttaaacatcgagaggcaccagggtgagaggtagaattgaaaatagaagagttaagtaaaagtctgcatactgaatgaaacgaacacctaccagattcagaattctgcatggtggggtagaggaactaaaccttctacacacacccaaagaaaagacctaactactctgatatttggattcccaaaggaaaaaccagctggttttttatttgccatagaatgaagtcaaccacttccatctatgtaactttccattgttattgccttactcttaaatatgagtggaatcatataagctgagaatcaccatatctctaaagaaagcttctggtattaaaaaaaatcgaagcaaaaaaaaagagggaagaaagaaaatcagcaatagtagaaacaatgcaggaaacaaactttaaagaaattgtaattaatattctcacagataataaaacaatacatctgtataataagtataggatgctctttacaaaatgggggagaaattagagatcaaaaacaacttttggaaattaaaaacatgataactataatttaaagctcaatagagtttggaaaacaaaatttaagggtctgtaagaaattagaacaaatgataaagaaatagagaagagggaggaatcctagctttagaaagcaaaaaattaaggaaatgtaggagaaaatatatcaggggactaatgaaaattaaccttcttataactaaaagataagagattctagtttaaagtgtacctcgcataatgcatgataagatgctcacatcagttcacacaactgatgtgaaatttcaggaccatgagataaagagaggattctggggttgttagttttatgtatcaaattaactgggctaagggctgcccagatagctggtaaaacaatatttcttggtatgcctgtaagggtgtttctggagaagattaacatttcaatcagtagactgagtaaaaaagacccacgctcaccagcgtaggtaggcactattcagtatgtcgagggtctgatggaataaaaaggtggaggaaaggcaaactctctcttcttgatctgggacatccatcttctcttgccataggacactaaagttcctggtattcggttttgtccaaattatataactggctttcttggctctccagcttgcatatggcatactgtgggacttcttggcccttataatcgagtgagtcaattcccataataaatctccttttattcatatctatctagatatcctatggttttgtttccctgaagagccctgactattataaacccaaaaacatagaagatggattgagaaatgggtcacaaacaaaggatcaggagtcagaatagcaccagacttcagaagagaggaactagaaagaaatggggcaaagacttcaaaaatctgagagaagtattttctaacctagaataccagactggcaaagttttcaattaagtgttgggtagaaatgcaaaagcctaaagaaagcaataattaccgcacatctttttctttttcttttttttttccttccagaaggcaactgaaggatgtgcttggacctaattttggtagtaatccaagaaaaagaaagagaggactcagaaaactggaggagggaataaagggatgtgacaaagctaagtcccaggctgacagtctggcagcaagcctagaaagcagttcatttacatgggagcagaagggtagagactctagtggtgatgtctcctgaaaaaggcttgaaataatagaatatatgccagatttaaacacatggaacttatattgagaaatatcttacagagcttttggtatttatggaaaaacttagccacaagttcaagaaaggaaaagaaactaagcaaatacaaataatgaagcaagcattgattccgggcaaatatgtacaagaacataaatattcataatatataactggttaagcagttagcactattcacatagtaatggtaataaaaacgttggtgactgattctgttagctactttgccaattcctacaccccttttttcctatcaaaatatcaattttgttcaggcagcaatgtgtctatctgaaaatctgtgcaatgctagattatcttgcagtgtgagatagccatgtgactcggtgcctgctgagacatgtgctaagggttcctggggaagttttcattttcctttctccttcttgtacctcttcttttttccttcctgcaacatggatataatgccagaggtgcagcagctaccttatgatcataagaaaacacacacacgtatacacacacacacacacacacacacacacggcaaaaatgagaaatagaaaaacaaaaagatcttgtgtctctgatgacaacacaaagcaactacatcagcgcttgactgcctgaaagctactattcagagtgttttctgttatttgcaaccaagctcattcgcaactaatacaatactggatgtggacataaccccaaattgtgatataactacatcagaagaatgacatcagtataaactggatataaaataaaaacataaacaaaacctcaattatttgctggcattgtaagaagccagagctactgatcaagagatatcagcttatgttcatcaattttaacatggagctacgtgtaagaaacagctaaaagatttgaacaaagttgcttctagggtattaaagagggtgaggtgcagggaactgatatatttgttgtgtctttgtctcagtcttctcaggctactataacaaaatatcatacactgagtggctaaaacaacaggcattaattttttcacagttctggaggctgggaagtccaagatcatggtgccaatggatttaatgtcttgtgtgggcgctctttctggtttgcaggtggccaccttcttgctgtagcctcacatgacagagagaggatgctgatctcttgctcttcttataagggtattaataccatcataggggtcatacacccatgacttcatctaaacctaattacctcctaaaggccccacctccacatacaatcacactgggaagttagagcttcaacatatgagtttgggggacaaagactgctatgcactaaataaacattcagtgcatagttgcacttctactgcttttatctgtaagttttttattgtttgtttgttttttaagacggagtctcactctgttgcccaggctggagtgtagtggtgcgatctctgctcactgcaacctctgcctcccaggttcaagcaattcccctgcctcagcctcctgagtagctgggattacagacatcttccaccacacctggctaatttttgtatttttagtagagatggggtttcaccatgttggccaggctggtctcaaactcctgacctcaggtgatccacctgcttcagcctcccaaagtgctgagattacaggtgtgagccaccacacccagatttagtattttgaaagacatactctgttgccattctactgcttttatctgtaagttttctttaaaaaattcattttgaaaaggatttcttaagctgcatttccttaattgtcagaatcaggactggaacgttaatccagtttttatgtgtaaaacagcacatagaattttcttgtcttttttatttcctgtttttttttttcttctatctttggttttcttgcttcatgacccacatttatttttttcacaatttatttttgagattttactttgtcaactcgtttattctttgattcatataagacaccttgttccatgtattgtactagaaaataggtttagagaaatgtacataatccttgtcctccaggcatctgagctaccaggaagtcattatagtctagggcaagtgataaagcaaaggtatacccatatgaaggaggaagtcctaggaaagttatggattttcaaaaacctggactggcttttcagggaagatttcctggtggaggtgactgttgagctgaatcttaaaacataatgttgattacttagtccaaaaaatggagagagatcttttctaggcatagggaacagaatgtataaagacaagaaagcaagagaatgtcttgggttttaggtaattacaaatagcttagtgttgcagaaacttggcaggtggtattaggttggtggaaacgtaattgcaatttttgccataaaagtaatggtagcagatcattccagcaggtcacagagggctttgaaagtcactttcaagaggggtgctactgaagaaccttaagcagggtgcaaatggaacagtgaggagggtaggaatgagaatggaatgcagcaggccttttcatgatatttaggacatctacaataaaggtgattccaatgaagagaaaggtttagaatggaagaaatgagtacagtcaggagacctcaagcctattttcttagagggacagaaggaggctatctctccatgtgttgctccaaactggcccaatctctccgtagctcaatacaaaaaaaagccccattaaaaatggaataagacattccagttaatatgatgaagaaacatcatctctaagaactccttgtcacagcccagtggtttgagcgagctgtcttttgaggagtacgggattcaggcagaagccctgagaaggtagaagtggcttcagacacaatttaatgaggactatgagattgcaaagagattggataaaccttctttccccttcttcaaattctctttggtcccttgtgaagtctttcatttttaatacatagatagtgtaataagatttggcaatgttaggaattacaggcaaaatcatggtttcttagtttatcccagggctttgaccctatcaagagtggtgtggctgatgtgggtgatggtggctgaatagcacatgggtagatgaaggtggaagtccttaatttggtatttccattccatatatgttacacattttataatcgtcttgaagtccttgggttttctgttcttttccattcttttttctctttgcatttcagttttcaaatttcagttgatagctcttcaagctaactgattctttcctcagttgaattcatcaaaagaattcttcatttctattatggtgtttttgatttctagcatttctttttagatctttgttagaatgcctatctctctgcccatattacccatctgttcttgcatgttgctcacgttcccattagagcccttagcatattaaccatagttgttttaaattcccagtctaattccaagatctccgccatgtttgagtctgcttctgagatctgctctctctcttcaaactggcagtggggggttgtcttttatgccttgtcatgttttgttgcaagctaaacatgatgtactgggtaaaagggatctggtactggttcccacagagttttctgctcctgggctttgctccactaattgattctctgtatctgactgttcatccttccatttggggggcagctgcttgccctatgctgggttttctgattgctttaagaagagctgttcactttaagtttattcagctttttctcttgttgtgtggatggaagagacaacttccaagctccttacctgctggactggaagcccaaagaagtctttaatttggaattctattcaccagtttatgaacagcactgaaggatttgcttttagaattttaaaatgaaagtttttaaccactcacttgtattcttacttagtgaatgacagggaagaactaggcttttgccttcatatgaggatgtttagtgagatccagttctcttcttatcgacacagaactttagaggactctgtgtcccattttgcaggtgagcacagctaggttcagacaggtaaagtgattttctaactttgcatagccgaagaaaggtcttgggcccaaatccaggtctcctgagtgagttcagcattcattccatgtcttatatgtcaccctggtccaccatcccaaagtcaatgagagtcctttaaccttcgttcacagagatgatagtcacatcggcaaagaatctggaggacaggtgtgggtggccttattagagagtgagaggtaaggaagtgatactaggaagactcagagccaagaagcagcattctgattagagaaagatgtgttttgaaaaggaaaagggacttggaggctgtaggaatgtgagtcaccttccttgttactccctggagttcagcaccctgcccaaatccggcaattgtctgcacagcaatgccctctagtggtttgaagaaagagatccttttcccaaaacttagctacagtagaaacttcaaacttgagtctctgggagggaaagaagctgtccttcctccatgcttctctttggttcagagatttgtctaaacagtgtttttctcaaaatatactttctaatgtatttttattcaacaatctgaagacatttagaaacgtgagtgatggaaagcattaacccatatggagaaccatatgtacctaagcttgaggatgggagagggaaagccacagaaacacacacacactaaagacatcctgggatatgcacacgtaactacaaatacttgtggtggttaaaggttttgtgagccttaaaggttatgaaatttgggaagctccctttgataaaagaaatataaaaatacaaatgcaaaattagatacagagccatgaaagggtctccttcatcagcttcatagtgaataaacttcacatgtacccatatgtttgtgcacacgcaaagaggaaattaaagtgtagagttacttttattttttatgctattcctgaagtcctatagctagtgagaataaaatcactttggaaagctgcacacttatttctatgatgttaccattgtttagaatttatctggaattacaggaattgccttcagatcctgtgacatattcctcaaaataccattaatcatggtaacttttatcatttcagtgcagattcatttttatttgaaatagccaaggccacacagagcctattctggtaagtactgagataggtagttaggccggatatgctgtttttggtcaagagtaaaaagtcatttaaataaaccatcaaactatttttcccatttattgcttctgtgctagtctgtgaacaagcttctctgaaaaggaactccaacatatttttagcaataaaaaaaatcatttggattcggaatgtagatggtacccacgagaatgtgacacggtcttacaactatatgaagataattgaccaggggcccagccactgaagtgtgaaatccatttacctgttcacacagaggccaggcctccccgggctgctcccagctcagaaaagaacgtagcagggactgaaggaagactcatccctagcagggacacctcttgatgaccagctttggctcaaagacatcccaagactttgctgaaccatttgtagactacacagaaatctaggatgtttccatcaaaccttctctttctccatccttcactcaaggtcaaacttgcctcatggtctgatgtttctcccagcttgcctccctctgatcctaccccacaggtatttccttcctgcaggcatttttcttaaaagaccttgcacatttgatctcgttttggtttttgcttcttgcaagacttccagctttccacagtaatcactttgaagaatggcgtcatctttgttctctctgatatctacgtaattgtaacaaagaatctggatccattttcttgtgtttaattgttgacggcttttatatctccttccttcctctactccttgtgccccacatctggaaagagagataataaagcctgggcccttcctccttagctctagcaggaaattcaaaccctataaccccctgccccagcacaggaactttcaccttggctctactccccaaccaccattaaaactcagatcaatctcctttcttcaatctctcaggttagtttggacctgcttgggaggcctgccctgatctcccagagaactcaattatataagtaataaaagttttcacagtctcttgatgaacatgtggcatcatcggttgcaacatctaaaccagtttgggagggaggtctatccctcttggaaggtggccacaatagtaataaaatgttgctagttaccaaatattggaagtggttagtgtcttagtcatctcaggctactataacaaaatgccacagactgggtggcttaaacaccagagatttatatctcgcagttctggaggctgggaagtccaagatcaaggtgttggtggcagatgtgtttcttggcaaaagcccatttcctggcttgcaggtagccttcagctcattgtgtgctcactagaccttttctttgggcatggacatggagacagcgaggtctctcctcccctccttataaggacactgtaggagtgtcctatttataatcccactatgggaactccatcctcatgacctcttctaaacctaattacctcccaaaggctccacctcctcacaccacaacattgggggttaagtcttcagcagatgaacttggaaggatgcaaacattcagtccataacagttactccggtccactacgaaaaagaaaatttgcaacgtaccctacattttcagttgagggggtcactagctatgcagtcagtcctcttccttcagggtgtgtaaaatgatgccattcagaaaatctagcactgcccacctactccccacgcaccactctaatataaaaagatggctgagagagagaggaggtggcattttgaagaaatgtcatgtttacaaaaagtagctctctcttctctccaaggctgagggaaggcgccaccaagacaaaccaccacacagtgggaagtgcctaaatcttttctccctccactaattctgggatgagaagatcatcttgtcagaaaggtgacaaacgaatggactggcaaacctaattaccagtagggcatgtcaataaaggtagaagagagaagatacggctgcaatggggggagacttccgtgggggagccagaactcctcacattttcatgtggcaaagatgtgtaagttttctaagacataaaggtagatagctccagatatcttgaagctatttcagcctataaggctgcaggcatggtatgggggacaaagaagcaagatgggataggcctgtagtgagttttgggaggagggggatatattgaaattgagaaacaaatccaaaggaatgtgcaggcagtgggtcccccagggctctcagaaacaccagccaacaccctctctgaaataaccagtattcttggaatctgacagctatgtgtcttggagacttgatacacagttagaatcgatggctactggctgtcggaaaacagacaaaagccaacagaaagaagtggtgactttgctacgggtcagccaataagggccccgtggcactcctctccttcctttgggctatgacatcgatgcggtatgtgccacctctatattcaagccacgagccacaagtgtaacccctataggcagggattggtgaggaggaccttaaaatgattataaaattaaccatcaaaataaacaacactgaatctaagagaaaggatgtaagacggatctaataactaaaagtgatcaaagaacaatggaattcaactgtgctatcgggaggagaatccactatcacgtgggggaaacgttgaatgaaacacaagtcgcagcagaaattgaaaaaaaaatgatttcgtgttttcgttttagtgagctgacactcttttttaaattaattttttaaactacaggccaggcgtggtggctcacacctgtaatcccagcactttgggaggccgaggcgggtggatcacctgatgtcaggagttcaagaccagcctggccaacatggggaaaccccgtctttactaaaatacaaaaaattagctggacatggtggcgggcgcctgtaaacccagctactcggcaggctgaggcaggagaatggcgtgaacccgggaggcagagcttgcagtgagccgagatcgtgccactgcactccagcctgggcgacaagagtgaaactccgtctcaaaaacaagtaaataaataaaactacgaaaacattttcaaagaaatgagaaaacattacctttaatttgatgcccccctatagatatatgcaattaattgctttcccgtttttagacaagttaatttaaactaggttatgtccattacgttcagccactgggctcgtactcacatctctccactttgaatatctgtcctcccagttcaatttgtatctcaaaatttataattttatattgctagagaaacaaaaccatctttttttctcttccttcagggactctggggaagagaatggggaagagaatgtcccttggctaagaatttaatctagctctttccagaactaattacaaaacctctgtgaggcgtttgggtagttataagagcagttcttaagcggcataaagctggaaaatgggcccatttcttattttcaacaggtcctaggagtcacagtttgaaagggtgggagtacttacattgttcaaaggtaaattacataaggtgttaactacatggagagaagaggctttgaaaactacggggatatttaaaaagtatttctcttccattttatgggcttagactaatagatctgatagttaatatttatctttgagagctgtgtgtacgtgcagtggagaaaagtgtggttgatgagtgcaaggttgcagggagagcccacagcttccaatgagcaatcaataggctatgaagattgtctccaactcactgtggtatggagaccccaaggggaccggatgaggagtgtccaggccagctcgggacgattctgtgggactggggatgccaagtccaccatcaactctctctgggatactgtcttaaatggactgagagctagataaaagttctgctagtggggaaggaggcagctactggtttgagatcagtctctgcagggaggaagaacattttgctgaaatgaataatgaatcacaggaaggagaatagggagagatgcttctcaataaggagcagacccccaaaataagggtgtatggctaggaattaggggagcccataagagcatccctatacggatttcatattgtgtttttcctttgtattatggcaacggaaattttagatatctgtgctcttgtattatggtttccttttgttattacaatcctgcagaacagtcgacatgcatacagacatatacatatatatcaaaggagatcagaggcgttctgcatgttatggcggtagacacatgcacatatgcctaccagcagtgttgtgaagaacagcataatgaaggaagtagggcctggccaatttgcccttctgagggtgccacgcagaggaagaggcatcctagagaaaacctccttcccaaataaacggtcagaggcccaagatagagctgggagccgtgggaagcaaagcagaatggtgagtcttggaaggcttgtaaatgaagccctttctccttccccgtatacatgaaaagcagctgacctttcaaaacgagaagaggctgacgtgtaggttactctactcactcctcgggaccatcttctcaaatgccacatcctttactaagctttccctgagctcatccaagctggaaaaaattcttcacacctctgaaagctgagagcccttgatttgggcctcccttatggcactgaacaatttctgctttaaaaaagttattttggaaagcaactcctttgttcagatacctttggtttgccccccactccccccagccccacttcactttttattctctccatccctttttcagctgagcggctgcaaaacaccaatagacccacatactctccagcgtctgcgggaatgggcctgggaggagctgtcacagcgggaagaaaagaggtcgggatatgtaatacctcagtgctttccctgaaaggtcacctcatggtgactacatacgtctttcaactgaatgtcactcctttcaaggtgcctgaaacggtaagaccctatccctttgtgtctggaattggttccttcccgtgggtccttggtcctgctaacttcaagaatgaagccgaggaccctcgcggtgaaaaagttcttaaacattgcacgtccggagtttgttccttcacgtgttcagaagcgtccagagtttcttccttctggtggggttgtggtgtcactgacttctggggtaaagccccacacctttgcagttagtgttacagctcttaaaggaaacgtgtctggagctgatcatttctcccagcgggttcgtggtctcactggcttctagagtgaagctgcagaccctcgcagtgagtgttacagctcataaaagtggcacgtccggagttgttcgttcctcccagtgggtttgtgatcttgctggcttccgcagtgaagctgcagaccttcggcatgagtgttacagctcataaaagcggtgagtccagagttgtttatttttcccagtgggtttgtggtcttcctaacgtcaggagtgaggcggcagattttcaaggtgaagattacagctcacaaacgcagcgcgcagtcagagtgagcactaagatttatcgcaaagaatgaaagaacaaacctcccacgacctgcaataggaccgagtgcgttgccactgctgtctctggtggcctgcttttattaccttatttggccccacccacatcctgctgattggtccattttacagagtactgattggtccgttttacagagtgctgattggtccattttacagagtgctgattggtctgtttttacagagtgctgattggtgcatttacaaacctttagctagacacagagtgctgattggtgcatttataatccttcagctagacagaaaagttctccaaggccccacccgacccagaagcccagccggcttcacctctcacctttccaaattccagcatctaccacccaccttacttctgaaggggctagggatgataatacctcagtactacttacccagataaccacaatgctccttaagcctcacctatattcattcctctgcaagtagatcttcagcttaacttactctgtgtatactaaatgtttattattggtatgttaccttgcacatcctcttcctatactataaataaattgagagcacattaataaatgcttgcattatgcctatatctgaccacggctaaaagagagtcttgtatattataggtgccggataaccatttatttaatgatatgcctacttgtctatttctggcacagagtttatcaaccttggggctactgaaaccttcggctgggtgggactctttgctgtagcgggctgtctggtgtgtttggcagcatccctagtttctgtttactgcataccagtaacactccagtcccagttgtgacaaccaaatatgtctgcagacatcgtgaaaagtcccctgaggagctgtatcacacccagttgagattcgctgccctagatgtttgctacttatgccgttttagcattcttgttaccaaaaacaatacctttactttgtaatagtagttcataatctacatatatgtgtatacacaagcacaccatggctgaatgcacatattgaattccataaacatgaatcattcaaagttgcagagtctgacatatacaaatacatgtgcacatgtgaaaaatgtatttgaaaggggctgtcaaagttaggaaatcaaagacagtttttcttattttttcttcattatcgaatggaaaaaaaatcacctacaaattggagataatattaaatgagatctctttgacctttacagagttgcacttagatcttcaaaagatcataggcataagtggaaatgtaaaagtgctaaacatagcgcatgaaataggaaataatcaaaagaaggtgcttcaaagtacaacagtaagaacacaagtgtctgccaatcccttcccccacatccagatattcactgagatgacccatggtttgcaggcacagggaaacgtatcacaatgccctttaatttgctgcttgcaagaaaactctgttaggggcctcggatgtctaaaagccactatgttggtctttgtaaattatctcaggtttcattcttcccctttcctctttgtatccatttgcttcctcttagctctggttctttctctcaccagcggatactgtgtgagtaccaccatgttgcagaaatctaggggaagccagtcacttaatttgtgagcattcttttgccagagggctctcttttattacaatgtcaatacagttcctccccctccctcaaagggctaaagatattgtgggactgttttgaggagtacttcaaagtcctgtgtggggcgtatgtgatggaggaaattttcccagggctttggtgcatggaacttaggcaaaatcactggaaactgcctgaagacccaaagaggcagtttcaaatgaggtcatcaattcaaacagagttggacataacaggaagagacagtgtaagataccaataatatcggccgtgctgggagccaacaaaagaaaagtatgagatcaataagaagcctagggtaattcagaagcccaagtttattttaaggccaagtacaagaatctgcggtggctctttaaattgctcccaaagcagctgacaaaaacgtgttgaatttcaagggtcaatagtataaaatcaaccacaataatagcaggcaccttaaattgaactttcaccaatcgaagtgagactttgacttaatgctgagttaagaggtgggtgtggctcatccatttaatggagaaaggtaacagcaacagccttcagaacacactggaggtggcttagttctgcttcttcgctctcactcataattgttgctgcagacttaacctaaagtctgttcatcagcctttccaaagattttctaagttactaagtatattttaataaatttctttctgcttaaagtagctagagaagattgtattctcatgattacaaatacaataatccttagattttaattcaagacacacacacagacacacacacacactgaaataacgcattctacacttacatgaatctgtaagaaactactgatgtttaggctcccatcctctggtcagccctcatttggaaacagggatagattaagttagtatcaattaatggagaaggaatacagtaagaggtgaaagtcttgtcaacatttgagactttctcattttggtgcacaatcagtactgtacagtatataacactagggtactgtaacaatatagattgattttaaagtatcatcttccattaacctacattgtatgcaactgaatttttgtttcccacttaaagctttacaataagaagttatatatgcatatatataatatacatataaaatgtatacacatatacacatattatagtataattgtgttcttatgacatctcaagacaacaaaaactacattacaaaatttccatctcaaaaatcagtctcccaagaaactaatttgcaaaggaaggccaccaaggaagtagaaagtttctggccatgattcaggtaaggacagatcccaggaagtcgagcctagaatttgtggtcatttactacttctgggtaatttttgattccttaggggatggctggaagaggttagagtggcaaaaaattggagttcagggtccactaagcagtgtttttttttctttttttaaaaaagagcctcactcttgtcgcccaggctggagtgcaatggcacaatcttggctcactacaacctccgctttctggtttcaagtgtttctcctgactcagcctcccgagtagctgggattacaggtgcctgccaccacacctggctaatttttgtatttttagtagagacagggtttcaccatgttggccaggctggtctcaaactcctgacctggtgatctgccccactctgcctcccaaagtgctgggattacaggtgtgagccactgcaccccgccggttttttttgacctctctcaccttaagctgcaatgtcaagggacagaatcctagaaatcagagttaactataagtagacaagtccttacagggaataaagtgtatctttgagtcatctatatatctgttgatcccatactgtatatctgggtcaccagatatatagatgactcaaaggtccgctttattccctgtaaggatgcaaatgtaaattatttttacaaagaatttttgaaatacaaatatgccacacaataaaacagcacaagagaaaaaaatatgaaaaaaatagcaagttattaggcagagaccttaaaatgtacatgattattatgtttatgaccaaagacaagattgagactttttgcaaagaattgactatgaaataaaagagattcaagtaaaaattctagaatgaaaataagaagtggcattaaggattcagtggcaagatttaacagtagattaggcacagctaaagagaatgagtgagttgaaatatagtcagaagacaatatacggaataaaccttggagaacaaaaggatagaaaatacaaaatagaagataagatatatacaaataaaactgatgaggagaggcacccaaggagagaaaggggtgcatgaggaagcaatgcttaatgagagaaagtggcaaagattcaaacagcactgtgaagtccatgaaagaaaaacaacaggaagttcagatctaagtacataataatgaaaactgtaagaaaccaaagacagagaacttttaaagaagttagagagggaaaaatagtacttataaagcaaataaggtagataaacaactcaaagttacagtaactttaagaaaggcggccgagtacggtgactcacacctgtaatcgcagcactttgggaggctgaggcaggccaatcacttgacctcaggagttcaagatcagcctggccaacgtggtgaaaccccgtctttactaaaaatagaaaaattagctggtcatggtgacccgcggctgtaatccctgctactcaggaggctgaggccaggagaattgcttgaacccgggaggcaaaggttgcagtgagccaagatcatgccattgcactccagcctgggtgactagagcaaaacaccgtctccaaaaaaaacataataataaaataaaataaaggtaagtttgttgctcacattacacagccattgcatatctttaggaatgcaaagatacactgctcatcataaatcactcaaaaatccaggctgatgtgtgtggcagccgtaaaagtacaccactcggatttctcttcaaggaggaacttgccattcagctgcaaggagtcatctaactgagcctctagcggcaacaccttcaagatttacagcagctgatctacacgcctcccaagcatctttcagctaatgactgagcaaagtggggggtaaaaggcatgaccacttctgctcaacatgatactcttttttttttttttttttttttcgatggagtcttgctctgtcaccaggctggagtgcagtggcacgatctcggctcactgcagcctctgcctccgaggttcaagcaattcttctgcctcagcctccagagtagctgggactacaggcgcacaccaccacacacggctaactttttttgtatttttagtagagatagggtttcactatattgaccaggatggtctcgatctcttgaccttgtgatccgcctgccttagcctcccaaagtgctgagattacaggcgtgagccaccatgccccagccgatactcttctaacaaacaattttgtcctagaggtcctcattgggtttgccaaggctttgtctcattcgcatgatatctgagactgcctcatctgattctgattttctcctctttacccagttctgtttcttccttctttatcttgcacagttgttaacacacccatacatacaactcttgcacatctctgtcaaagcctctacttcctggaggaccagaactgacataacgggggcagccatcagcaataacattgctggtccccatgccagaaccacaggagagttttgggggatccttgcatcagcaattaaatgcttcagttgaaagtggcacacctcactcctatccacaactcacaggccagaattaatcacatgtccacatccaacttcaggtatgtaaaaagtgtgactaaaccatggaactagaaatagttggtgaacagcattaagaaattccgcaattacatctaatggagcactaatttgctgacagctgacttctcaagacgaataatagaaactagaaaataatagatgataaattcaagatgaaagaaaacaaatgatagccaacctagaatcctgtacagaaaaaatagctttccagaataaagaattaaaaatattttcagacaatggtaaataattttattaacagaggaattacactaaaggaaatacaaaatgatgttctttaggagaatgaatacaaataaaagttcagaaatgcatcaagaactcaagaatataaaaaacaattaaaatctatgggcaagtgaatattacatgtacagttgactcttgaacactgcaggggttaggggctccaaccctccacacaatggaaaatgtatgtataacttttgactccctccaaacttaactactaacagccctcttttggctggaagccttaccaataacataaatagttgattaacacatattttgcatcttatatgtatggtatactgccttcctataataaggtaagctagagaaaagaaaacgttattaagaaaatcatgaggaagccaggtatggtgggatgcgccagtattcccagctaattgggaagctgagatagaagaatcactggagtccaggcattctggactgctgtgcactttgccaactgggtgtccacactaagtttggcattaatatggtgacctcctgggagaagaggaccactaggttgtctaaggaggggcaagctggcccaagttggaaacagagcaggttaaaactcccatgctgattagagtgggatcatgcctgtgagtagtcacaatgagacctcacctcttaaaaaaataataccatggccatatgcggtggctcacgcctgtaatcccagcactttgggaggccgagatgggtggatcacgagatcaggagatcaagaccatcctggctaacacagtgaaaccccatctctactaaaaatacaaaaaattagctgggcgtggtggtgggtgcctgtagtcccagctactggggaggctgaggcaggggaatggtgtgaacccgggaggcagagcttgcagtgagccgagattgcaccactgcactccaggctgggtgacagagcaagactccatctcaaaaaagaaaaaaaataaaaaatgaaaatcataaggcaaaatatcatagccataatgagacctcacctcttaaaaaattagtaccaaataaaaatcataaggaagataaaatatatttactattaattaaaaggaagtggatcatgataaaagtcttcatccttaacattttcatgttgagtaagctgaagaggaggaggaagaggagttgaccttgctgtctcaggagtgacagaagtgggaaaaaaagtccatgtataggtggacccttgcggttcaaacccatattattcaagagtcaactgtataacaacaggataatagtaatctagattatatatatatatatataaaatctatgtaatgtaaatatacgaaaattgtttataagatgaaaagggtgaaattgagttacagagttcaagttgcttatattttcttggaacagatacaaaaaactaatcaatattaggctttaaaaattcaaaagtgaaagttaggtaaatgctaaaagaataatcaaaacttgtgtatgtgaaaacacagtaataagatccaaaagcagaaagggaagaaaataaatgcaataaagatgggaaaaattgaaaacaaatagaaacatggtataaatatttaaacaaaaaatatattagtagttataataaaaaacaataagctaattacaccagtgaaaatacaggagttgtcagactgggttaaaatagtcaaacgatattcttcgtataagagatgtattttaaatacaaggatgcaaaaaggattaatataaaaggatggaaaaaaatgttatgcaaaatccaatatttgaaaaaggtagtagatatagtttggatatttgtcccctccaaacctccaaacctcgtgttgaaatttggtccccagtgttgggggtggagtgtaaagggatgtgtttgtgtcatcaggtcaaatccatgaatggtttggtgctcttcttgcaataatgagtgagctctgtctctatttagttcccacgggacctgtttttttgttttttttgtttttttttttgagacagagtctcgctctgtcagccaggctggagtgcaggggtgcgatctcggctcactgcaacctccacctctcatgttgaagtgattctcctgcctcagcttcctcagtagctaggattacaggtgtgcgccaccatgcctggctaatttttgtatttttagtagagacggggtttcaccttgttggtcaggctggtctcaaactcctgacctcatgatccacctgtctcagcctcccaaagtgctgggactacaggtgtaagccactgctctgggccaggaactgattttttgaaagtgcctggcacctccccgctggcttgccatgtgacttccgcatgctgactccctttctccttccaccatgagtggaaggagccggagtccctcaccagaagcaggtgctggtgccatgctctttgtacagcctgtagaactgtgagccaaataaacctctgttctttataaattgccagcatcagatattcctttacagcaatatacatggactaagacagtattgtaactatattaataagagaaaaaaataggctttaagtcaaagataaagaggaatactttacaatgaccaaaaggttcaattcaccagtaaatataacaattgtaagtttgtatgcacttaactatattgtctcaaaatatatacagataaattaacagaaccaaaggataaatagataaaaatccatgatcatggtggaagattttaacatacctctcaataactattttttttattttttattttttattatggagttgtgctgtaatcacccaggctgaagtgtagtggcacagtctcggctcactgcaacctctgcctcctgggctcaagtgatcctcctgcccaccctcccaagtagctgagactacaggtgcacgccatcttgcccagctaatttttgtatttttttgtggagaaggggttctgccatgttgaccagtctggtcttgaacacctgggctcaagtgatcagcttgtctaggcctcccaaagtgttggaattacagggataagccaccactcccagttgacttttaaacctctctctctctttctttctctctttcacacacacccacacagacacacatgcatacaaatgctaagtgtaaaggaaaatgttaactctatattcgaaaattaaaaacttctgctcatcgaaaagtaccattaagaacatgaaaaggcaactcaaagactagaagaacatacttgctacatataaagccattgaaagacttgtgtctagaatataaagaacttgtataagtcaatcagaaaatgcaggtggtctaaagaacaatgggcaagaggcttgaagaggaacttaaacaaaagaagatatcctaatgaccaataaacatgaaaaagtgttcagcctcattagaaatcatagaaatgtgaattaaaaacagaatgtaaagtcactgcatatgcataagaactatggctaaaatgtaaaaggctgattttaccacataggtaaggatatgcagcaaccaaaagtttcatacatttcatatattttcatatgaaaatatatgaaaataaattcatatacttcatatattcctggtgagaatataaattaatgtgatcactttggaaaactgacattgcctactaaaattgaagatctgcattccctataatgcagtaattccatttctaattatacacctatcaaaagtgcatgcacctgtgcatcaggaatcatgttcaagagtgtttatagcaatactgtttgtaaagccccaaactggaaacaacccaaacacgcatcaacagtacaaacagataaataaattgtggtatattcatatattgatatattatatagcaatgaaaataaagcttatcaacatgaatatcacaatgaaaacacatataaagctatgtgaaaacacatcattgaaagaagtcagaaacaataaaacacatatggtataattcattatataaagtttaagaaatggctaaaactgaaatatagcacgtaggtatacatgttttaatactgtgtgtgtttgtgtgtgttatatacatatatacttcctgcttttatgtatataacacacacacgcataaccacatgtacacacacagagagattgtttattgtccccgtccaaatctcatgttgaattgtaatctccagtgctggaggcgggcctggtgggagatgtgtggatcatgtggttggatgcgtcataatgttataggagttattaagaaattattttaggcagagagagaggaaaagaggtccttgggaagtttttgtttcttttaaagcagctccagaaatgtttcttgtctagcaagaaagccctggctctagagccaggccagcaaattttgatatgcaaatgccaaacattagactgggtccacccaaacatggcaattctctccaccttcttcttgcccttgccccacatgttcctggcaacatggccatccccacatattcccacatgtgtagaacatcatggtgccctgcatttgcatattaaagggctagggtgggagggcatgtatagaacatcatggtgccctgtatttgcatattaaaaagctaaggtgggaggaccagttttttcaagggctatgtgaatgacatgcctggtcaaaacaatcccctgagccctatgcaaatcagacactgcctcctccagcctcctcatataagcagcaatgtttccttagcactcagggtttcctccctgggctttggatcccccctccctctgtctctgtatggggaagctgttttcttcttccttccttctcttttgcctattaaacttttcactccttaaaactactccacatgtttctgcatcatattatacaaactggcgcaaagaccaagaaccctggtgttcctccactcattggagccatatcaatagcttggtgctgcctttatggtagtgagttcttgcaagagccagtcatttaaaagtgtgtgtcaactccccctccaactctcacttgctcctgcttttgccacatgacatgtcagctcccccttttttttctaccatgattgtaagcttcctgaagcctccctagaaggcgagcagatgccagcaccatgctttctgtaaagcctgcagaactgtgagccaattaaacctcttttcttgtagattatctagtatcaggtatttctttatagcaatgcaagaatggcctaatatagaaaattggtaccgggagtgaggcattgatataaagatacctgaaaacatgaaagtgactttggaactggctaacaacagaggttttgaagagtttggagggctcagaagaagataagaagatgaaggaaagcttcatcattccagaacacagccacagtaggcagcaggcaccaaaggcatttgaaacacaggttgaggaaaccaaaggccaggagagttgaaggttgcccaagtttgcacagccagttactagcagtgccagggtctgattcctagtccaagctctctctgtctgacagtgtgctctatcaaaacccagcaatccactgatgtttatggtggcattattcttaatcgccgaaacctggaaccaaccaagatgtccttcagtaggtgactggatagataaactgtggcaaatcctgacaatgaaatattatgcagtgctaaaaagaaatgatctatcaagccatgaaaagacatggatatcattgagtgaaattcatattaccaacatgcatattaataagtgaaagaaaccaatctgaaaaggctacatactgcgtgattccaatgatacgacattctggaaaagacaaaactatggagagggtaaaaagttcaccagttaccagaggttaaaagggagggagagatgaataggaggaaaacagagaatttttagggcagtgaaactattttgtatgatactgtaatggtgggtacctgctattgtacatttatcaaaacccatagaatgtacaaaaccaatggtaaaccctaatgtaaactctggagtttggatgatagtgatgtattaatgtaggttcattgattgtaacaaatgaaccactgtgataatggaggagactgtcagggtggtgggggacaggggtatagtagaactctctatgtgttcttgccaattttgctttaacctaaaactgctttaaaaatgaagtttatttaaacaacaacaatagaaatagaaaacatttttcatggttctggaaaagagcttcaaaaaaattcaagcaaagatggccaaatagaaacagctccagtctgcagctctcagtgagaccaatgcagaaggcaggtgatttctgcaattccaacagagcctagcaagctaagaaccactggcttgaaattcttgctgccagcaaagcagtctaaagtcatcctgggaccatcgagcttggtgaggtgaggggcatttgccattactgaggttttagtaggcggttttcccctgacagtgctaaggaggctgggaggtgtggactgggcaaattcaccacagcacagcaaagtggctatggccagacttcttctctcgattcctccttactgggcagggcatctctgaagaaaaggtaacagccccagtcagggccttacagacaaaatgcccatctccctgggacagagcaagtggaggaaggggaggctgtgggtgcagcttcagtgcttttaattgttcctgcctgctggctctgaagagagcagctgatcctgacaagaggggttctcccagcacagcacaccagctctgctaagggacagactgcctcctcaagtaagtccctgatccccgtgcctcctgactgggagagacctcccaacaggggtcaacaggcacctcatacaggagagttctgcctggcatcaggctggtgcccctctgggatgatgcttccagaggaaggagcaggcagcaatctttgctgttctatagcttcccctggtgatacccaggtgaatagggtctggagtggacttccagcaaactgcagcagacttgcagaaagggggccagacagttagaagaaaaactaacaaagagaaagcaacaacatcaatatcaacgtaaaggaaccccccaaaaaaccccatccaaaggtcatcagcctcaaagatcataggtagataaatccacgaagatgaggaaaaaccagcacaaaaatgctgaaaattccaaataccaaaatacctcttcttctccaaatgactgcaactcatctctagcaagggcacaaaactggacagcgattgagattgaattgacagaagtaggcttcagaaggtgagtaataacaaactcccctgagctaaaagagcatgttctaacccaatgcaaggaagctaagaaccttgataaaaggttacagaaactgctaactagaataatcagcatagagaggaacataaatgacctgatgaagcttaaaaaacacagcatgagaacttcatgaagcatacattagtatcaatagctggattgatcaagcagaagaaaggatatcagagattaaacatcaacttactgaaataaggcatgaagacaaaattagagaaaaaaagaatgagaaggaataaacaaagcctccaagagctatgggactatgtgaaaagaccaaacctatgattgattggtgtacatgaaagtgacggggagtatggaaccaagttggaaaacatacttcaggatattaccctggagaactttcccaacctagaaagaaaggccaacattcaaattcaggaaatacagagaacaccacaaagatactccttgagaagagcaacctcaagacacataatcatcaggttctccaaggttgaaatgaaggaaaaaatgttaagggcagccagagagaaaggtcaggttacctacaaagggaagcccatcagactaacagtgggtgtctctgcagaaaccctacaagccataagagagtgggggtcaatattcaacattcttaaagaaaagaattttcaaccctgaatttcatttccagccaaagttcataagcttcataagcaaaggagaaataaaatcctttccagacaagcaaatgctgagggattttctcaccaccaggtctgccttacaagaggtcctgaaggaagcactaaatatggaaaggtaaaaccagtaccagccactgcaaaaacacaccaaaatataaagaccaatgacactatgaagaaactgcatcaactaatgtgtaaaataagtacctagcatcatgatgacaggatcatattcacacatgataatattaaccttaaatgtaaatgggctaaatgccccaattaaaagacacagactggcaaattggataaagagtcaagacccattggtgtgctgttttcaggagacccatctcacgtgcaaagacacacataggctcaaaataaagggatggggaatatttaccaagcaaatggaaagcaaaaaaagcaagggctgcaatcctagtctctgataaaacagactttaaaccaacaaggatcaaaaaataaaaagaagagcactacataatggtaaagggatcaatgcaccaagaagagctaactatcctaaatatatatgcacccaatacaggagcacctagattcataaaacaagttcttagagacctacaaagagacttagactcccacacaatgatagtgggagactttaacaccctactgtcaatgttagatagatcaatgagacagaaaattaacaaggatattcaggacttgaattcagctctggaccgagtggacctaatggccatctacagaactctccaccccaaatcaacaaaatatacattcttctcagcaccacatagcacttattctaaaatcagccacataattggaagtaaaacactcctcagcaaatgcaaaagaacagaaatcataacagtctctcagacaacagtgcaatcaaattagaactcaggattaagaaactcacttaaaaccacacaactaaaaaaaaaaaatatatatatatatatatatatatatatatatatatatatatatatatatatatatatatcaggccaatatccctgattaatagtgatgcaaaaatcctcagtaaaatactggcaaactgaattcagcagcacatcaaaaagcttatccaccatgatcaagttggtttcatccctgggatgcaaggctggttcaacatatgcaaatcaataaacataatccatcacataaacagaatcaatgacaaaaactgcctgattatctcaatagatgcagaaaatgccttcaataaaattcgccattccttcatgctaaaaactatcaataaactaggtattgatggaatatatctcaaaataatgagagctttttatgacaaaccaatagccaatatcatactgaatgggcaaaagctggaagcattccctttgaaaactggcacaagacaatgatgccctctgtcaccactcctattcaacttgtattggaagttccggccaggacaataaggcaacaaaagaaataaaggtattcaaataggaagagaggaagtcaaattgtctctgtttgcagatgacatgattgtatatttagaaaatgccattgtctcagcccaaaaacaccttaagctgataagcaacttgagcaaagtctcaggatacaaaatcaatgtgcaaaaatcacaagcattcctatgcaccaacaacagccaagcagagaaccaaatcatgagtgaacccccattcacaattgctacaaagagaataaaatacctaggaatacaacttacaagggacatgaaggacaaggagaagtacaaaccactgctcaaggaaataagagaggacacaaacaaatggaaataattccatgctcatggataggaagaatgaatattgtgaaaatggccatactgcccaaagtaatgtgtagattcaatgctgttcccattaagctaccattgactttcttctcagaattgggaaaaactactttaaatttcatatgaaacccatataaaaagaacccatatagccaagacaatcctaagcaaaaagaacaaagctggaggcatcatgctacctgatttcaaactatactacaaggctacagtaaccaaaacagcatggtactggtaccaaaacagatatatagaccaatggaacagaacaaagacctcagaaataacaccacacgtctacaaccatctgatcttcgacaaacctgacaaaaatcagcaatggggaaaggatcccctatttaataaatggtgctgggaaaactggctagccatatgcagaaaacagaaacttgatcccttccttacaccttatacaaaaattaacttaagatggactaaagacttacatgtaaaacccaaaaccataaaaaccctagaagaaaacctaggcaataccattcaggacataggcatgggcaaagacttcatgactaaaacaccaaaagcaactgcaacaaaagccaagattgacaaatgggatctaattaaactaaagagcttctgcacagcaaaagaggctatcatcagagtgaacaggcaacctacagaataggagaaaaattttttaatctacctatcggacaaaggtctaatatccagaatctacaaggaacttaaacaagtttataataaaaaaacaaacaaccccatcaaaaagtgggtgaaggatatgaacagacatttttcaaaagaagacatttaggtggccaagaaacatatgaaaaaaagctcatcatcactggtcattagagaaatgcaaatcaaaaccacaatgagataccatctcacaccagttagaatggcaattattaagaagtcaggaaacaacaaatgccggcaaagctgtggagaaatatgaaagcttttacactgttgatgggagtgtaaattagttcaacaattgtggaagacagtgtggcaattcctcaaggatctagaaccagaaataccatttgacccagcaatcccattactgggtatgtacccagaggattataaatcattctactataaagacatatgcacagtttattgaactgtgcactgtgtttattgaagcactatttacaatagcaaagacttggaaccaacccaaatgcccatcaataatagactggacaaagaaaatgtggcacatatataccatggaatactatgcagccatggaaaagaatgagttcatgtctttgtcagagacatgaatgaagctggaaaccatcattctcagcaaattaacacaggaacagaaaaccaaacactgcatgttctcactcataagtgggagttgaacaatgagaacacatggacacagggaggggaacatcacacatcgggacctgtcagggggtgagggcaagggtagggagagcattaagacaaatacctaatccatgcggggcttaaaaactacatgataatttgataggtgcagcaaaccaccatggcacatgtatacctatgtaacaaacctgcatgttctgcacatgtatcccagaacttaaagtaaaataaaataaaaaataaagcttctttgatttatttcccattggcgtttttctgtagctaaggagcagaatccttccccaggcagggaaaagacgggcaagtgccagtctcttctccacttagtgtccagggtatgtggcagttttcaaaaggctccctcagtagacttgaagcacaaacaaataccctgaatttctacgtccaagtcattgtgagtctcatcatgggagcctcagaggataaaatgatttcataaagtgtttcctgcaattcttgattctggtctaaatgttgtggtggcttcaaggaccataagtcttgtaaaaaaaaaaaaaaaaagaaaaacaaaagcaaaacacacacacacaaatccacactctgctttctgcagtgtgatactttgtaggaaaagggctaccttagagatgctctcagtaatatccacctaggagaaagaaaccaagtttgtggagcccctacctgtgttaggctctgtgccgggcacttgacatgcttcatcatattgatttctcatgacaaccctgcaatagtgatattattattcccattttacagcttaagaaacacaggtacagagaggttacttaacaccaaagacattcaggaggtgagttgtaaagccagaaggcaatccaagcttgttttgttcaataacattatatcaaggaatccttgtcttggaggaattaactctgacagcaaatgatggtgggtccagtgattcagggaaaagtgtggcggggcctgagtgagcatcctttgaagggttgctcactcactcttgttggtaattcagcagctcgggcaatggggaagaggctgctgtttcacaggcctttagtccatactctgcagccagtattgccggccttcccctctctccacacaccgaccaggctgcccttccatggccaattccccctttcaggttgcccctgatgttctatgatggcttgagactggctttagtctttggatctctgccttcttgtttgttttgatcccccttggaaactgtgagttgcaagctgcagaagtagactttaagattgctcaacactgaataaataaaaccgtttctgatagcctgcagtaagcatgtcttttttttttttttgagacggagtctagctctgtcgcccaggctggtgtgcagtggcgcgttctcagctcactgcaagttttgcctcccgggttcacaccattctcctgcctcagcctcctgagtagctgggactacaggcactggccaccacgccagtctaatataaactgagttcattcatactccactgggggctcaggaaggaaactcagagtgctattggtgttagacaaataggagctggaagttgatgctaagtgaggtcagagcacatgtcagggatgccatgctctgtggtacccagtgaagcaccaagaagagaagagagttaacggatgggtttgatggtgagtatgatatagtatctcacatcttcttattcagcacctacatctggggaaggtctccagaaaacttgagggcctatcgaagggaattatgctgagccttgcatagagtcaagtatatggaaagggtctaggaggcagaagaaccttcctggaaggaaggatgtgacagaaggcatgccacggaccagtccaggtgtctgttccctagccctgcctgaaaagagaaaagctggatgtaaaaaacaaagtaaccatttttctgtcattcggggcatagactttgaggctccagtgacaaaaaggaaagctgagagttgctggtgggaggcatgctccccattgctgggcaaaaaccacaggagacagcccagctcacatgctgagatcaatgccacggggatcagtgacacaacctggctgtactgtcttgagggcgctgcagtcctggctgaactgggagatagcgtgctgggagcagcagcagcattctgtgtggaaatccacggcagccttagcagtggtggggtagcacttcattcaagctgccacattgccacagacatcgacaagaagctcagggaagaaggacttaggagggctatctgtgaacactctgaggacctgagcacttccagtggggctttgggaaggttacaaggagcaagtagagagaccaggagtcagcagcattgagtatccaattcacactgacgcaacctcatttttaaccacaggttgggaggcctggagacagaagcaaagaatcgagaaagcccctgataactattccaaggcttgatcagatatgtgagccaggaaaactaaacgcagctcaagtgcttgagatctcttgaatttccttagcctcctacccctcgagagacctttccaaggttgctctctgtaagaaaaatgagagcgcctcccaacctgctctagccaataattcattcggaaacaagttgcttatctctttgatctgggtcacggagggtgcccctgtctgagctgcttgtatgctgggtactctcgctaagcctcattgactgcaccgagggatgctaggggagggaccatttccatatctgcattagccagctttgggtcaattaaagtaaaactgaaaacaacttggtaggctgctggataagcaatgttggggctcagaagtggataccccaaaatatggtgctgtgaacatgcagaactgaagcagcctctaattctctctgacctctcctcctcccctcccatctctgtctctctccaagcataggatgaagttgttctctgaagttcctttatctgcctgaagtccaaacctgccaaaaaagaaaacaatgacctctggttctttccctgagtttcattcactgaactgatatcgcaggaaaaaagactgaaatctgtcaacatacctggacagacttttgttacaaaccattatctggtctgcggactgtacagactttgtcctaggccctttgtatgttcttcaaggccattgaattccccaaaaaatcattactaccccccaaaattgtttatacttccacacctccctatcgcctaagaagaagggtatcttagcacccataccctactgtgtggtgggaagatcactctgatatcctcccatgcatgttaataaatatgtatgccttttctcctatcaatttgcctttttcatttgattttcagcaaatattcggaaggcaaacgggagatttttcctttgatccctacagcaactttccatatctcagtgtttccggaaaaagcagtactgggtaggcgttgatcggcaaaaggtgtgactgtagctgctaaaaccagcagagcgagtgtcatcacctctggttgcttttccttcagccctaaataccctctcatcaagccttcttccacctaccaaacacctcccacccatgagtccaaaggtctctctcctcttcctgcgtccctcaggtctaaaggacatggtaagccgctaggatttcttcctctaagttaatgggtaggctgcttgcctatgttatgcctgtgtggcagggtcaaagcggttctggcttctggtttagtagtactgtctgagcacagctgttcaacagacttaagtgtagaaattccagcacacaggcctggctcggtggctcacgtctgtaatcccagcactttgggaggccgaggcgggcggatcatgatgccaggagatcgagaccatcctggctaacacggtgaaaccaggtctctaccaaaaatacaaaaaaattagctgggcgtggtggcgggcgcctgcagtccaagctactcgggaggctgaggcaggagaatggcgtgaacccgggaggcggagcttgcagtgagccgagatcgcgccactgcactccagcctgggtgacaaagcgagactccgtctcaggaaaaaaaaaaaaaaaagaaaaaaagaaataccagcacacaaacaaacgactttcacattcttaagtctgtgacaaggttgtttttctggccaggaatactcatctccttcccaactcttattgctttaaaaatgtcggccaggcgcggtggctcacgcctgtaatcccagcacttcgggaggctgaggccggcagatcactgaggtcaggagatggagaccatcctggctaacacggtgaaaccccgtctctactaaatacaaaaaaattagtcgagcgtggaggcgggcccctggaatcccagctactagggaggctgaggcaagagaatagcttgaaccctggaggtggaggttgcagtgagccaatatcgcgccaccgcattccagcttgggggacagagggagactctgtctcaaaaaaaaaaaaaaaaagttattgttccaaaaaaaaaaaaaccctcaaacaaaattaaaaattaaaacaaaacttcacccagaattgcaccacgaaaacacatcatttgttttcattttccagctttctttccttcgcacatttataagtatcatttacatagtcataaccataacagagataggttctttctgtcattttcacttaatagtctaccattattttttccaagttattatacagtttttctaattataattttaatgaacatgtattccatggagttgatgttcaataatccacttaacatccacttaataaaaattctccaagtcattctggaagctgcgtctccagccccaggtctttggcaagccttacacagatgcaccaggtctcagagaacatgccctcctctgacattgagagcatcctgtctccatttgccagactcccagcaaatatccctttgtatttcctaacgtgtctacatgcagatgtgttgtctctctttcctagatactgatagcctcatagacaaaaccaagtccctttcacctctgaatcccctacacttagcagaatacctgacattttatggtgctcggtaaaagtggataattaacaacaataacagcaatgcttgtagcatgagagctcttcattacaagccacagaaatactactactctgcataaatttagcagaaaaggagcttattaaaattaaacatacatctaactgatgacccagcaatttcactcccagttatgtgctcatgagaaataaggccaggcacagtggcccacgcctgtaaccccagcactttgggaggccaagttgggcggatgatgaggtcaagagatcgagaccatcctgtccgacatggtgaaaccccgtctctactaaaaatacaaaacttgctgggtgtggtggtgcatgcctgtagtcccagctactcaggaggctgaggcaggagaattgcttgaacccgccaggcagaggttgcagtaagctgagatcacgccactgtactccagcctggcgacagagtgggactccgtctcaaaaaagaaaaaaaaaaagagagagagagagaggaataaaagcatatgtccacaaaaaacacttacgctagaatgctcacctcagtcttattcagaattaccccaaactggaacacaaaccatccatccattattgggagaacagattaatgatttgcggtgtgttcatacaatggagtactactcagcaagaaaaagaggcatgctgctgatacagaaaccaacttggatgaatcttgaaaacatgatgctgagcaaagaaagccagacacagaagaatccaataggcaagacctcgggtgatggaaatgtggccgccagggcactgataagccaggaaacacccaggcattactcagcttgtcaggcactgaggcacaaacagctgcaagtggatgtggctgctcttcctttgatcctagggaaatgtcttaacatatcaattagacaactcctggtgacttcacagggacttcgaatgagaagattctactgaaagaataaccaccattccaggcttctctgttctggcaaagctcctaggcactcaggaggctggagtgagggatacaaataacacaaaccagagtttgagatggcacggattctgccttttcgtactcttgctggaacatggcagagagtggagtgtgggccaaggggctaaggtccccatcagggatccctggattttgagggtggagaaaggagggcacgtggcttcccttttggctggtttaatcctcatcctccatctgcccttcatcagtgaatgcctctgcttgtccaggttgagctcggcagctggaagcatgtagacaacaggctttacctgagtcggagctgtccatgagctggaaatgaacggttctcaccacttaaagtgaaatcacctgaatgaacaagaattgggttagagattttgcctaaggctggatataaatttttttagtaccaggaagtgcatagaagtggaggttgaatgatcctttctttcttcatgttctatatatggacccatgatttccttactagaaagacttgtgtctgatgagcccgcagactatggagaggcaagcaggattacctaaagaagaacccatgatataatcccagcactttgggaagccaaggcaggcggatcacgaggtcaggagatcgagaccatgctggctaacatggtgaaactcagtctctactaaaaatacaaaaaattagccaggcgtggtggcgagcacctgtagtcccagctacttgggaggctgaggcaggagaatggcgtgaacctgggaggtggaggctgcagtgagccaaaatcgcgccactgcactccagcctgggtgacagagcgagactccatctcaaaaaaaaaaaaaaaaaaaaaaaagagaagaagaacacatgaaagtcacgtagtcttgcaataagctagctgagacgggaggctcccttctccttatggagagaatttgcacatgatttcaacttccaaagtctccagatgctagccagttggcattttccagcacagttggcccagccaaggttagattttgttcccaagtccgtaatgtttatttgctgcctgcaaaatcactctcatacttgctctgtaaaattagagagtgaaagggaggcgaggtctctttcctggtgcacaacctcatggtgcatccagggggtcttgtacagatctcaatactgttctgtaacatgacaggagagaaagggcaacccgtgatgccgctgacccttttgcctttgaacatcagcatgcaccaagtactgtgtgctggtgttcacctaaacactgcaaatagttcttccgctagaaccccaaagtgggaaacatcttaaacacagaaagaaatgcagttgatgaacagccaaagtaactggcaacattcattatatttctaacaattaaaaggatttggggaaaggtccatcggacaattctggccagtgtccaagtttattcaatgcagtataactgggtcattttaaatagcagatttagtcagaaagacttgagcttaaatttcacatttgtcacccactagatgtataataaaaaaaaattacttaacctctatgatcctcagtttattatttataaacttgagatgattacatcagcttcaaccaggtgtcatgcagcttaagtaaaatcacccatgtgttgcactttgtgcaatgactggaaatataacaaattcccaataaataattgtaactattatttataatgctgttaacatgaacaaaggtggtaataaagaaaaaaatgacaaatggacaactctggttcctggaggacagcctcaaatctgccagatcacttcaaccagcttttctcctgaatgaggatggtcgtagcatcccagaactgtgatctacaaacccatacagcctagcaaaatgtggctgctttcagcaatggcatcaaggcaggaataaatattgtagtaaaaaaaaatgagaggtggaaagacaaataattatctttgaaatgacttggcttaggtctgaaaactccgatcccacggatgaccgaaaatgtaatcttactaattcaaaacaatttgttcactcctgtttaaaacttactctcatttaggtaaatcctttgcctggcatgagcagagcacatcttagaggtggctgaggctgagatgttgctgggattcccacgccttcgacatctgcccctgaccttctaggccccatgctacagccactggattgtcatccctccagcccagtgttactggaatcaaaagaacccaagggcggtttcttggatctcattcaagaaagaaatcagggcgagtccatcaagtaaagtgaaaggcaagtttattaagaaagtaaaggagtaaaagaatagttactccatagacagaacagccctgtgggttgctggttgcccatttttatggttatttcttgatgatatgctaaacaagggtggattattcatgcctcccccttttagaccatatagggtaactttctgatgttgccatggcatttgtaaaccgtcatggcactggtgggagtgtatcagcgaggatgaccagacgtcactcttgtcgccatcttggttttggtggggtttagctggcttctttactgcaaactgttttatcagcaaggtctttatgacctgtatcttgtggcaacctcctgtctcaccctgtgacttagaatgcgttaacagtctgggagtacagcccagtaggtctcagcctcattttacccagctcctattcaagatggagttactctggttcaaacgcctctgacaccatggctgcttctggtaagcagacctctctgcaacttggatgtttctgccctctctagtaaaattcagttgctctcactccctttgaggcaggattttgttcttcaaattcctctttgtaatcaatgtttgccctctttcttcaggattttcctcctgatcttctagccaagcttttgggaattcaaatatttactttttttctttacaagcgcctgattcttggaagaaagctctatggcattcatgattgcagaatctgctatagatttaccagaacaacaaatgactaattaaaagttcaaatgctggaacttgactcttttgttaactttgtaccatctgtagcctaagggcagtgtacatgaaaagccttttcttcagtgataaagggaaaggtgtagggaaaaagagatcaaagtaatcacacacataatatcaaaatacttttcactgcaaatacaattatttctgcctatatcttctgcctgtagcgcaaggctagctcaggctgtggcccagaaaatatccccttggcattcccacatcctttgtggatgccccaacttcagcaagacagacaccaagtgagagtttcagagcttctcaagtggaatctggaaagcacaccagtggaaatgttgcaaagagtgtctgccatgtttgtttctaagttaggagggtgagctgggaatactgatgggatcgcaaaacccatcaccacctaggaaaggcagaaagatataataaagaattaggaaatctcttccacaatttagaggccactctgctgtgcttggctaatagtcgacttgctctttggtgtgtctggcaagaggttagaagattcaaaacagattatcagcaaggagttgacttggactctgcctgtgttatttttacttcttgactcaacctcccttgtttgaatgcaagaggctgctgcagacataggacatttactccccaactgtattgtcccaactacaggaccctcctgtagttctaagtgcctcctaatatttaggctgatacttttctccaagtcaggaaaatggctctaagtagagtccttgtaccatattgcgcttccatctgtcaactttgccttccctagagccacacagaaccctgctgtccacagcccaatctcctgtccatccctcttctgtcacaaaactgccaagtccaaatgggaaagcccttgggaaggagaatctctgaggatctgcagtagagccaagatttgaagacagtggtcctagttccaggtttggtgtcctctctgctgtgtcaatctatagctcccaagatttaaatctagctcagtgccccagccccagcagcaacaaagataaaagccatctgctagaccctctgctgcaggcccctgcagcaattgcactttactgccttataacaaggaagtggcggttatgctgggagcaattacccgagcttaaaaacatcagcttagataaaattagatttgacctgagagattgttccaaacaccaacttaactgcctttgatgttctgaatcccatcaaattgcacatagttctctcttcctggctttaaagtcaatctcttcatcagagaagtgagaaagacctgtttttcctgaacatctttaaagccctttccccgcaggtgttgtaacaggctggcagatgtggtgtctgctagttgtatcaaataccacagcacttgagccagggatattagctgagttatcactctgaaagtttgcgcccagagtcatagactgatgaaagggacaatccctgtcccttacaggtggagagtccaagggccagagaagtcctgtgacctgctcaaggcagatgggtcaaaatgccagaagcaagacttcatcccagaactccactcttcctatgccatcctcttccatgctttcatgatgacttcttacatctgggccagattttgacttagggctttcacaatttgaggaacagagaagtaactaattgggagaggcaatatttgaatactgaaattttgatttcagaatgtattgactttttatactacaataaagaaggatgatagattaggatggcaggagcaaaggagtaagtaagttccttgacaaatgggacatgcccatcctctttcctgctttatgcccagcattaactctatgtttaacacatagtaggtgctcagtaaataattgggagagaaggacaagaagggaaggaaggaataacaggaaataaatgggcagttatatgaaggcactcttgctctgaggtctatgggttttatagtcacttctttagcctaagatttttctctaatgtctggtttttgattttgggatttttttgtttattttagttttcaggtttgtttgtttcttgttttgcctaagttaaagagattttgaagttctcagaagtctaacttctggataagtggaaagttgtgaattttattgagtaattctttttgattaattttcccaacctcgcataataatagctagggttagcagtaaaggaaaaaaaaaatgtggcttccacccaagtatatggagttccattccaatcctcttcccttttatgtcctcccattttccctggtacttttggtctctttgtgctccatatgaaatctacttgggctatatgtgattccttttgggtctagatttccaataagcaaatctgactaaaggacccaaattgagatcctctattcactcatgcattcatacatcaatcattcaaagaatatttgttgtgctcttgcaccatacactttgccaggtgattctaaaatgaatggggactgggcgcagtggcccacgcctgtaatcccagcactgtgggaggccaaggcaggtggatcacctaaagtcaggagttcgagacaggcctggccaacatagtgaaacctcatctctactaaaaataaaaaaattagctggatgtggtggcatgcacctgtagtcccagctactagggaggttgaggcaggagaattgcttgaacctgggaggcagaggttgcagtgagccgagatcatgccactgcactccagcctgggcaacagagcaagactctgtctcaaaaaaaaaaaaaatcataacaataaaataaataaaatgaatggggtttaatccctgacctcacactcacaatgaataaagtaaacaagcaattatgcaacgaatatgatcattggagcatcaagaagacagaaactaatttttctgataggtagaaaaattaagactttatagagaaaatgatattaaaactgagtttgaaatatgactaggattttagaaggtaaaaggtgagaggccaagtgagaagaaatcactgcaggcagaggttaaaatcgaatcaataagaataaagtccaaagtcctcaatgtggcttatagttatctgcctactcatccaatcccatcccttatcacttttgtgccttttcggtgtacgcagacacaaaggccttcttttagtaactagaatccttgaagcctgtttccctcataggacatttgtacttgctgttccctatgattaaagcattcttcttcaagttattcatatggctactttaataccagcatttaagttgcagctcaaatgctttgtatgagagaggcgctattataaatcagaggcgctgtacaaatcaggaactattctgtaatggctaagtaacttatccaaggccatacaacttgcaaatgaagttgccaaaaattgaacccaggtagttttggcgtgtagacccagtgtctcacactgcctctctcactctatgaactgatcttatttatacatttacatgcctccgtctttttgtactagaatatactctctgtgaatgcagagcccttgtctctcttgttcacagctgtatcctcagcacctaacacagagcctagcatataggcactgccttagtctgttttctgttgctataatagaatacctgggactgggtattttttttttttttttgagacggagtctcgctctgtcacccagacccaggctggagtgcagtggcgtgatctccgctcactgcaagctccatctcccgggttcacatcattctcctgcctcagcctcctgagtagctgggactacaggcgcccgccaccacacccagctaatttttttgtatttttagtagagactgggtttcaccgtgttagccaggatggtctccatctgctgacctcgtgatccacccctctcggcctcccaaagtgctgggattacaggcgtgggccaccatgcccagccgggtaatttcttttttaaaacaaaatttattcctcagttctggaggctgggaagtccaaagccaagggacttcatctgcttggcttttaattagtgctgtcttgctaagagaaggcatcacccttcttttaggcatcaccctgtgatgggaggcatcacagggtgagagaggcacactgagagcccaaatgattattaaaacagacctattttcatgaaaactgacccactctatgataccgcattcttccactaaaccattaatgatttcattcattcattcatgcagaggcctcatgatccaatcacctcttaaagccctctgaatactgctacattggggcttaagttttaagatgagtttcagaggggacaaacattgaaaccatagcaggcacctaggcaatattttttttttgattgaataaatgagaaaaatctggagagagagaacgtgtgcataaagaagataagaggtatactacttttaggtaaggaaatagcatggaggtttatttaactgtgacctctgagaactatgcccctatttttatcccttccctcaaagtagtgatagaattgttggaaatataggtcagataggaacagatatgttggctggatagtaagaaatgggggaaaattgagggtttggtgggggcgggggtgaggaatccttgtgttatgccccaaattatcagatataaatgactgcccactcctaaccaaggaagataatgggtatcacttcatggaggtcctttccacagagcagtgatcactgaacagcaggaaaataacttcctgaaaggtccccatggtgtcaataacctaggagtcctctccagctgatcaagcctagatggccgcagcagatggtgttaatgagcctgaaatgactcaagctattcctgcagtctgctgtctgccagcagctccctcttggccacaggtcactgatctcttctcagtcaagtgccagggtgctcactggactatgtcacctcgcctggtaggttttctaagatggcagtggttttaagtcaatgattgctgctcctggccggagcttctcaggcatgtcccaaactggctgtgctcctcaagggaggagtctggatttgccctttgagtttctgattcatagggcagtctccagctgctgctcatcacaccctgctttttttcctagcctttgaaaagaagccacatgattcaattgttgacggttctcctcgctttctagcaaataaaccctcacagcttcaatggaatcagtgatgatggtttgggcttagaaagttataatgtggcttactcatcccaaatagtaactaacatatattgattactttttctgtgccagagacttttctaagcctttaacaaacattatctcattgaatttcagaataattctaggtcataggaactttattatccccattgcacaaatgaagaactgaggggtagagaagttaatatcttattcaaagccttataggcagcaaatggcatagcttatatctgtcaaatttcaaagttggagtttttagtagcttacctattgggctatgttgacatgttcatgactttctttttttattattatttatttatttatttatttttgagacggagtcttgccccgtcgcccaggctggagtgcagtggcgcgatctcggctcaatgcaagctctgcctccccagttcaggccattctcctgtctcagcctcatgagtagctgggactagaggcacccgccaccactcccgggtgattttttgtatttttagtagagatgggatttcaccgtgttagccaggatggtctcgatctcctgacctcgtgatccgcctgcctcagcctcccaaagtgctgggattacaggcatgagccaccatgcccggaccgacatgttcataacttttgacctctccaaatattccctaatgtgagagttgaaagtacacaccactacctgtcaatacatctgctgtgttacaggatgatttcctaaagtatggtttctttaaaaaaaaaagttactttcctgtcattgcaatagtttgctcagaatgatggtttccagcttcatccatgttcctacaaaggacatgaactcatccttttttatggccacatagtattccatagtgtatatgtgtcacattttcttaatccagtccatcattgatggacatttgagttgggggggggaggagtggggagggatagcactaggagatatacctaatgtaaatgacgagttaatgggtgcagcacaccaacatggcacatgtatacatctgtaacaaacctgcgcgttgtgcacatgtaccctagaactttaagcataataataatgcaaaaaacagttacattttctaatatggaaacctcaccacctgaaaccaaagatacagagacatctgttgcttctagccttggtcagaattgacttagaaactgagtgtcagaaatgatcagttctgaggcatagcccactgaccagataggcagagaggataaattttaaataaactctgttaagtccaacaaagatatattttaacaatgactttctaaacgcacgattgtattagttgatgccagaactgcaaaggaatataacaaggtgtgctggatgctttattcctaggataagtagagatgaatcttgagttagtccaattcagccccacttcaactatgaatacagcattttgcttctaaaccatcaccatcattttatttatctaaaccaccatcatctctatctcaaagagcttctaagtgttctgggtcattctaggaggattcttcacatggcaaggtggaggagggctgcacagagtgtcaaagtgcaggtgcacatcactcctaatcaataatgtcctggcagctatcagtgaaatttactcactggagggtgaagagatgaacattcttttagtttcttggcatacggaatgttcagttttcacttgcatgggaatggaataccttcagataatgcaactttcatatgccactctggtactggggacagatgcagctcacattggcatagggtggacagtcctttattagtagctcagctgtcatctctttggttccacatccagcccatggtatctttatctagtctgagagtgtgaaaactgttttgcatcttcttccaactatattggtcttatatcctggatgctagctttaaaaatccaaaagtcaaacatttagctctgttgctgtttctgctttgaaaactctccttaaagtttagttgcctaagctggagggagatgcttctatgtgtgtttgcaatgatctctgtaatatttcccttgtctaattagacacaagaatttccagtcacagccacagattgtcaaccagaggtctcccccatgggggactgccataagcttaaagcaggaaggggcagagaatgtgtgcttctggcaggcaaacaggctcttaatggaaaataaggaaggggctgaggtaagcatgctcacttttcttctaaacacatcaatcagtcattcctccctctctgtgatgaagactgggagcatggagaaaacctatacaagttccttctatgacttttgccactgtgtaacaaagtgagaatttcctcttctatggaaacttgaacagtgggaaaagggtgccaactttccttcatactcagcaacagagtgaggatcactagaatagaggtgcaatggtaggctataactccatacagaagaggaacttctatatggagttcaagtgggaagtatgaaaagggcagaataaagtagaccagacctcttattttcatgctatggagttaagtttcaacaccacctcaaaacccctctgttgtaagtaaagaagaagaaggacagtgagccaagatcatgccattgcactccagcctacgcaacaagagcaaaactctgtctcaaaaaaagaaaaagaagaaggaaaaaaaatgaaacaaaacaaaactctagctagacagagtttcatgcttggtttctctttctacaactttaaatacttttctggaataaataaacatgtgctaagtgcttccactggaaatttcaaccacagctctacatctcttggtcaattaatcaactagtcagtgaaaatgcactgactttgtaatcccagctaccaggaggctaaggctaatgcaggaggattgcttgagcccaggcatttgaggctgcagtgagctgcaattgtgccactgcgctgagagagctgctacctaacagtagtgtactccaaatcaactgagtgttgtgtttacttgctcttggctgtgctagaacccaaagatctttggttactgagattagactggtaactttggatactgagattagaatttgaagaataggtaacaataggcaggaaagatagttacccatatggtatgaaattataatgaaatgactgcatttattgaatacttctgtgagtcagacattcaattacatgctttacatgtgttacctaatttaatgagagaggagaaattatcctcaattaacagataataaagtagaagttgaagaggttaataatttgttcaggattaaatagcaaacaagtggaggacaactcgaaaccaagtctatttaatttttaaacccaagttcttatatctcctaagggatagaacttcttttgcaggggaagagattctccaaagattggtcatggagactgatgtgtcactgctaaagacacatttcttccagttaaagcaatgttgtcacacccacataatttttggtcatattgtaatatgtttagtagttttacttaaatcagctcacaaatttggcttaaacgaaggaatgaatattttactactttaagtgaaaaccagtgttacatataaaaagaagataattacacatatacaagacaatgttattagatatcaatgttatcagatatcatgtcattaaatatttgcttcctggtgcagactttgaggttagacctgctgtgttgttgttaaaaaagaaaatgaaattagtaaattttggagatgcattaagacaggctaacactacttcgagatgttttctttggtatcctcaagagatttggagtagaaataaaaaggttataaggttttcacaaagtgatttaatattgcaacgtattgtccatttaccactttaagtcatctccatgaagccaaaggtaatataggaaaagctaagataaagtatcacatccccaggaatgtctcattaaaatgtgctaccctctggtttataaggggatgaggggcaaaattaaaagttgccctgaagagaagagacgtagaagtggtggaaagaagtaatgaaaagtagagggtatttccaaaatttggctctgcagagcttcctccaagaaagtacattcattcttggaaatacatttttccaaaaaatatgttttcttatgccacactgtccacttcacaattcttgccaagtttatttatcatttaaaatgttatatggtattgttttgttacgccatttgttagcaaccattatattatttacacacttggcacactgcaccaggaaaactaccaaatcaaaaatatctattttttgctaccagaaaaaaaaaatgcttcctaaagcatttgggaagaagtaataaaaagaagaggataaggaactagaaaaaagattaatgagtgatccagatagtcaaattttcatcccagaaccatgtggtcagtctcttggctggtacagcccaggtcacaataataaaatttttatagttaacatttattgacatatataccatagagtgcttagcatatgtcagagactctattaagcattttcatgtattaattcattgaatcattctgacatccataaattaaaaactataattattctcattttacaaaaaagaaaatgaaagcacagaaaggtcaggctactagcccaagtcacatgctattttgtgatgcagctgaaatttgaactgaaacagcagggccagagatgacacagccccaatatattggtgttaagccatctcctaatttttctgagatgactctctctctaggtatgacaaattaatacatgagatattgtgtccaatttatcacatgctataatcatgaatttagttaatccatactaatagtaatcatttgcaaagttgccttgaggcacaatcttgtttacgattaaatcccctggatccaacacagaccctggcaattatagttggtgtcccataataatattagtgaccatggctagcaatatggtagaacgaaagagtcaactgaatgaaggccacaaaacccgggttcactcagcagatataaaggcctggaaaactcatctacatttgctgctctttactttccttgtctgtaaaatgggtatcttaacctccttccatatggcttgattattgtgaggttggtttaaggaaccaacataaactctgtaaaggaccaagaactaggtagaaaaactttggcctcaattatgccttctagggcaaaatatttgaaacaatagttcataaaaaggatatccaatgcccaattttttttaagtttctcaattttattaattatgatggaagtgcaaatcaaagtcacattgagatactaccccatacccaccagaattgctaacatagaaaaaggcaaagtacacagaatgtggagcaactggaactctcatatactgctggtgagaatgtaaaatgatacaatcactttggaaaattccttggctatacctactaaacgtaaatatgtgcatatcctatgacctagtaattccagtgctagctatacatttgctcatcaaaagacatgtagtggaatgttcacggcagcactattcatagcagttcacaactggaaaaaacaaatgaccgacaatagtataatggataagtaaattgtggtacattcacacaatggaataccacactgcaataagaatgaacaaactggccgggcctggtggctcatgcctgtaatctcagcactttgggaggctgaggcgggtggatcacgaggtcaggagatagagaccatcctactaacacggtgaaaccccgtctctactaaaaatacaaaaaattagccgggcgcggtggcggtgcttgtagtcccagctactcgggaggctgaggcaggagaatggcgtgaatccgggaggcggagcttgcagtgagccgagattgcgccactgcactccagcctgggcgacagagtgagactccatctcaaaaacaacaacaacaacaacaaactacaacttcataaataatataggtgaagctcacaaacttaacactgaattaaagaagtcggaccataaaaaatatatatataatatataatcttacttacataaagatcaaaaataggcaaaacgaatctatggtatgagaggtcaggagagtggggtacaaggtagacttcggtgtgcagataatggtttcttgagctgagtgccggttacatgcttatatgaagtttgtgaaagttaattggtttacttgtgtactttgctgaatatgtattatattgtaattaaaagtcaacgcacagatacatatgcaaacttcattctctctgtatctttaaatggcttctgtatagcagccacttataaatttctctaacttcctgattaacatgcctattaagatagcaaagtaaaagataaaaaaaaaaaactcgcagtgctcgaagtctggcaggcaaacctgttgggagcactggagggaatttttgtttgcctccaggctgctgatgtaaggttgaaaacaatctttttttttttttttttttttttttgagacgagtcttgctctgtggtccaggctggagtgcagtggcgcgatctcgactcactgcaagctccgcctcccgggttcacgccattcttctgcctcagcctccagagtaagctgggactacaggcgcccgccaccacgcccagctaatttttttgtatttttagtagagacggggtttccccgtgttagccaggacggtctcgatctcctgacctcgtgatccgcccgtcttggcctcccaaagtgctgggactacaggcgtaagccacaacgcccagccgaaaacaatctaaacagagtaccctgtgatgccatgggtgagcctgtctttttgaaaataggtagaaatacgtttcttccttttccagtatctttagaaacttgaagtctgcacctaatggaaaattgagctcacatccttgctttaacactgagggcaaggcagggtggggtctctccctcctcttgccattacaagcctcgttatcatataaaagaagcttgaaatggccagtcctgttatcccaggactttgggaggctgaggtgggcgaatcacctgaggttaggagttcgagaccagagtggccaacatggtgaaaccccgtctctaccaaaaatacaaaaattagccgggtgtggtgtggtggtggcacctgtaatcccagctactcaggaggctgaggtgggagaatcgcttgaacctgggaggtgaagtttgcagtgagctgagatcatgtcactgcaatccagcctgggcaacacagtgagactctgtaaaaaaaaaaaaaaaaaagaaaagaaaaaagaaagaaagtatctcttttacttggtatgtctcctaaattaggaattcagttttttagctatgttcaggtggatcctatagtgatggggaaaatatggctcggcagaacttcctccaagaaagtatgttaattcttgggaaatgtatttttccagaaaatatgttttcttgtgccatattgtctagctcacaatatttgtggtttgtttatcaattaaaatggtatctagtattgttttgttataccatttgttagcaacagttatgttatttacacatttggcacactgcaccaagagaactatgaaatcaaaaatatctgttttttgctatcagaaaaaaaaattcttcctaaagcaatatgttgatattttcattgtcaaaaaacttaagtggacattttgtttatttaaaacttatatcgaagttgatatctatgatgtgtaaagtgttcctacaagtaacaaacaatccaaaagaaaatgggggaagggtatcaacagcaatttacagaatttacagtgaaaatggcaataaacataaaaatatgcatagccttcttagtcatgaaataaatgcaaattaaataataatgagatgctacagttttcagatttttaatccagcaatcctacttctggatttttattttattttattttattttattttgttttttgagatggagtttcgctcttgtgccgaggctggagttcaatggcgccatctcagctcactgcaacctctgcctcccaggttcaagtcattctcctgcctcagcctctcaagtagctgggattacagtcttccaccaccacagctggctaattttttcgtatttttagtagagacggggtttcaccatgttggccaggctggtcttgaactcttgacctcaaatggtccacctgcctcagcctcccaaagtcctgggattacaggtgcgagccaccatgccttgcctctgggtatttattttaaaaattgaaataaggatctggaagagctgtctgcaccctcatggtcactgcagcattattcacaacagacatggaaacaacccagatttccattgacagatgaatggataaagacagcatggtaaaaacattcaatggaatatgattccaccttaaaaaattggaaattcttgctgggtgcagtggctcacgcctgtaattccagcactttgggaggccgaggcgggcagatcacgaggtcaagagatcgagaccatcctggtcgacatggtgaaaccccatctctactaaaaatacaacaattagctgggcatggtggtgcgcacctgtagtcccagttacttgggaggttgaagcaggagaatcgcttgaacccaggaggcagaggttgcagtaagccgagatcgcaccactgcactccagcctggcaacagagcgagactccatctcaaaaaaaaggaaatcctgtcgtatgtgacaacctagataaaactggaggaagttatgctaagtgaaataagccaggcacaaaaggacaaatactacatgataccacttacgtgtagaatctaaatcagtcaaatacatagaagcagagagtagaatggtggctgccaagagctagagacggggaaatggagagttgctattaaacgggtataaaggttcagtgatacaagacgaataagctctagagatctgctgtacaacaccatgcctacacttactaatgcagtaaagtgcagttaaaaatttgttaagagggccgggcgcggtggctcacgcctgtaatcccagcactttgggaggccgaggtgggcggatcacaaggtcaggagtttgagaccaacctgaccgacatggtgaaacctggtctctactaaaaatacaaaaattaggctgggcactgtgactcacgcctgtaatcccagcactttggggggcctaggtgggcgcatcacaaggtcaggagatcgagaccatcctggctaccatggtgaaaccccgtctctactaaaaatacaaaaaaaaaaaaaaaaaaaattagccgggcgcgctggcaggtgcctgtagtcccagctactcgggaggctgaggcaggagaatggcgtgaaccggggggcggagcttgcagtgagccgagatcgcgccactgcactccagcctgggcgacagagcgagactccgcctcaaaaaaaaaaaaaaattttgttaagagagtagatctcatgttgtagtcttaccacacacccacacacacatacagaatcaaaagggcacaaggaaacttagaggtgaggaatatgtttattacctcgattgtggtgacagtatcatggatgtatatgtttctaaactgagtgaattttacactacattgaatatatatggttatttgtttatcgattgtacctataaaggtgtaaaaacaaacaaaaatgtaataagtgatccaaaatagaagagaaagtcaggagagaattatatcacaaaagtcaagaaaaaagggtttcatgaataacagagtgatcaataataatgaatggggcagtgagttcaaatggagatttttaaacttaaaaaaaaaagaaaatctccaatattgtcttaatagggaatttcatacattgttggtgagagtaggaccagaatatcccctttagaagacaatcaactttaagatttaaaatgtacatcaacatttgaaaattgtaagccttggcagggcacagcaattctactatatgcctgggaagcagagatatttggcaagcaatgctaataactataaaattgaggccgggtacagtggttcaagcctgtaatcccagccctttgagaggccaaggcgggtggatcacgaggtcaagagttcgagactagcctggccaagatggtgaaaccctgtctctactaaaaaaatacaaaaattagccggacacggcggtgggcacctataattccagctatttggggggctgaggcaggagaatcgcttgaagccgggaggtggagattgcagtgagctgaaatcgtgccactgcactctagcctgggagacagagcgagactccatctcaaaagagaaaaaaaagaaaagaaagaaaaaaaagaaaattgtaagccttttgacctgtggttcttccagagatgcttatgcaagtgtggaaagacacaattagatgatattctctgcacatgtgtttgtaatagaaaaattgcaagaaatctaaaaatgaatgggaaagtttaaaattaatactactgccatatcaagttgttcaatgcaaaaagaagatgggagaagagactattgtatatttaaaaccgtatataatccattttttaaaaaacacacacacatgcatatgtctatgcttaagaaaaattctggatgaatatgaaaattcttatcagtggtcattttggggagggtgtgatagcaagtggtttcactttctgctttttatatttctgtattgtttgaattcttataatatgtttctaaaactgctacaatcaggaaagacaataaagatatttaatactacaagatgtactccaaatgctaggaatgttatatctaagtgatggaaatttggatggttttaaaattattttccaaaattgtctacagtgaatatctattccttttcaaatcagaaaaaatagtggaatttaaaataataagtctacaatttaaactctagcatatgatcaaatttatgtataaaatatgcacagcataaagcctcaaaagacatacacctaagagttaatggtaattaaatgggtggtgggattataggagatttttccttccttctgctcacttgcaatcaacagctgagtgatgtgaagatcaatggttggaatgacagcaaatttatcattattgtaattgatgtgctcattagtaccttagttctctcccctggtttcctacaggcttattatttccacacagcaatgttaattatggtgataaaaccctggaatgaatggctagaagtagatccaatggcaccatggaggtaagccaacagaatagaaaggagtcttgctttattctgtcctgcctcctaccttaagacaagtcgatttctgaatcactttacacatacagttgtcagtaattttcctgaagacaaccgaagaaacacaatctggatactggcattccagtgcttcctacaaataattaaatctcacaactgggcaagtcacgaccttgtgcttttgttttcttttataaacaaaattcagcaatggatgtgggtcaggactttgtaaaaacaaaaccccaaacttcaaggtttacccttggaaagaaatatctaaaatgaggaagaagagttgcccaatgtctccagccctgaggcccctttgtctttcaacagtcttccaccctaatgcccactgccaccatcaccaccatgtaatgaaaaaattgtttataaaagaaaacaaaaacataaggtagtgacttgcccagctgtgggattgaatcatttgtaggcagcaatgaaatgtcagtctccagattgtgtttctttgtctgtttcctaagaaaacaccaattcttttttaatggctcaagcataaataaaaccctttattttatctctttttacataatagaattttcaaaagttctttctaaataatagcatagctgtacaaaatatgaaaagagcaaagtctaaaacaatacaccaaaatgttaacagtggttttattgaggaagtacacctatatgttatttttactaattattttttctaggctctttaaaataaggcatatacaaggcatatacatttttactgtgcagtgaatctttcactacacagacagaagtctcttcatctcaagaagctcttcttctaatatatcattgattatttctgtagttaaatagttctgtttcctacttttagaacaataattatctggtcactaattttacgttctctgttttcactatctatcatttctctaattggaattttccccatttcctgtatattcttggagagcttttccaatttgttatcatctctgtcacccatatgatattgtctgcaggttcagttctatttgtctctacaattgctgttaaaatatcagcttcattgccatattcttccatctcttttttcatcttacccggttgtcttttcatttagcctactcttgccttaaagattttttattatgtgtcagggaaataatgatttctactctactgacaatgctaaatcatgtcctaatgattcattcttgattctgaaatatatccttttcagatataagttcttatttgtctctggattgatattacctttctattcttcagcagtatttttcacaaattggtagtgaaattccccttgagacagtatctgttcactggggtgatgaaaaatcccctgcttagatctatgttgttcacttatcagtgttaggttaactgatcagcattatgttaatgtatgtaaatgtatcagcataaattaacatgtatagctcctaatccaactttcattccaatgaaatgaatcagtgtggagcagaatccaatggtttgatgctgaaagaaagcaataaggaggagggctctgtactctaagagatgagaagggcaccgaaagtgacatgggaggcattttaagcacattttattttctttgcacatttgccctgggctagcattggcccccgccttgtacagtacagcatctctgtgcttgccatgaatatgtaacagggaggaattctgtgggctatgaataagggtgatgaggaaaaataggctgttgtggtcaaatatacttaggaaacaggatgaaatacagttgaagaggtttgtttattgtgtcaatattcagacactcaaatatgttgagtggattgtgtatgtctaggaagtggctggcttgattagggaacatttctcagacttcattgacagtgataaactgttgatggaacatcgtattgatcagacatttcctggaagatactttgaagaacattgttttacttttgtacaactcccattctctctcactcgagcctttctctgcccatacagataaggcatgggggtcacagggcagctagttacaacacgccaacttcacggggctccctagaaaaacctagagtctctcatggaggggtaaggagaagcagctgtacatggcaaatatgatttatttgtggcatgagtgtttcctgccacccatggcaaagaatgaggattaaagaaggaacacattcaattacaagtcaatttcaagaggctcagacataagtgaggccctgagtccttcttcatttttatatgcacctagcagtacaaccaggaaacaaaagtgtattgttcatgaaaaagttgtatcatacagatattttctcgatgtgatgtggctcatagtttcccataacatccaattaatatgagactagagggaataaagagctcattgactccaacacccttaatttacaatttggggaaactgaggaccccagatgcaaagcagcttgttataggggacacggaatagcagtgctgagtctggaactgagtgctacccccactaaactgagatgcccaggatagaacttttaaaaatacgagtgtggcgttaaagaccaaataagagcaaagctaaatgacagtaaaaccatctttgcaaaaattatgacagtgagataaatctaatgtagaaaaattatgacagtgaaagaaatctgatgtaaccaactccatcttgcttctaacctacaagctaccccctccttcattcccaggtacaggctaagctaactatggcaggaatttagtttatagtttaactttgaaacaaagatgataatagccccttcccaaaacaaacctcctacttgcttggggatcagaccatttttataaaactaacacattagccacgagattaaaaattatgcctcaagagtcatgcatccagaggtcacaagattcctaatctccccaattgctcctatagctagcatcactattgtaaaacctaagattggtattcaaagtagttttcagactctgcattctgatggactaggtggcaccatccagactggtaaactggcttatctttcttgtgaccccacccaggactgactcagtgccagaggacatgttttgacaccctgtggttttgcatccctgacccaaccaatcagcattccccattccctagctccctgcctgccaagctatcctttaaaaaccctagcttctgaagtttttgggaggccgatttgagtaataattaactcctgtcctttcacttagctggctctgcatttattaagctctttctctgttgcaaaaatctgcttttctctgtgcatcagcttttctgagcagcaggaaagatgagcccatcaggtgattacaagagagctttattctaaacattttattcatcattcttaaacaattgcaaaatttaaaatttcttagtctttccattttggcagatttttaaaaaggattgttatttctttcattcattcattcattcattcattcattcattcatatttactgagcatctgccatataccaggcactgtattagaggcttggagtatcatggtgaaaacctttggcatcaattttgcttatattttgatgggggaagacagatattatcaaaatgatgtttatacacattactgggttgattataacaaattgtacaagtaccagacacatgtagacacatagaaagctgaagagtaataccaactagaataaacaaaattaatactgaaccatgaatacaaagagtcaaggagcgtaaaaaatgagattgtttttgtgaccttgaaatcccatttgccacagaagtggaggcagaaatgaaaataccactattgcaatcctcatgtgtttggaaagggctctggggtgggacccagcccacaaagatggttctagactgatttcctatttggtaaacccaagtgaatttcccacctcctttagcaacacagctttctagtgaagaaacaaaaataggcatgtatatgctaaacctgagttgaatcacagtgctgagattatgggcctagctgctagggatctcgaggagccttgtccaacattctaaatgatccttgcaggcaacatgccttagtaggttgcaaaggacaattcagagcaagagaacagaagcagttgctgggcaaggtgagagggtgcaggccatgtcactgagggaagaccttactttctcttccatttctgagtgctttcagagcagatagagtccactttcaagatttcaccaggctgtagaataaagaacaaactggggcttcagagggaggccacacagcctcctccctactggctcctccactgggcactttgtgacattggccaagtccttcaaccacgtagagactcactgtcagaggtgtgtgaaccagagcaactccatcttgaataggagttgggtaaaatgaggctgagacctactgggctgcattcccagagggttaaggcattctaagtcacaggatgagataggaggtcagcaccacatacaggtcataaagaccttgctgataaaacaggttgcagtaaagaagccggctaaaacccaccaaaaccaagatggtgacaagagtgacctctggccgtcctcactcctcactgctacacttccaccagcacgatgacagtttacaaatgccatggtaaggtcaggaagttaccctatatggtctaaaaaggggaggcatgaatagtccacctcttgtttagcataccatcaaaaaaaaaaaaacataaaaatgagcaaccagcagcccttggggctgctctgtctatggagtagtcccattcttttattctttcactttcctaataaacttgctttcactttactctatggactcatcctgaattctttcttgcatgagatccaagaaccctcttttgatgtctggatcgggacccctttcctgtaccatcactgcccttgctttgaaaagccctcagttgaaaattaaatgggattgcaagttttaagcctggcacacagtaggagttcaaaaaataccacctcctccttcccatcttctgcctgcattctaagctaggttgcttcgtaattttgtcactaacttttgctggactctaatttatctgggcgtcagtttcatcatctataacacgaagaaatagggcgagtggtgatccccggggttcctttcagttcaagcattttaggattctatcatcacaatagacgccccacacagggaagaaacagcagaagctgagatttctgtgactttggtctgtaggggtgagttccaggaggctcccaggcatcaaccatgacctatgcaaagacaagaaaaataaatgattaggaaagggccaacattgcagtgtgcatgcctgcaaacaattcacacacagttggaggcacccagctggaaaccagtgtttcatttgcagcttcatttgcagcagaaaagttgatatttgcaataatgtcagtaacttagagttgggattcagtggctcctggcgtgagccaacaccaaacaaccaattttcactttgcaagtcagaatgacccctccgcttctccatgctagagggaaagggaggtatgggtctctgttgggacaagtttgggcacggagtccacaagggcttcagatggcagtttctggactgcagttcttgccacttgcaagctcttcacaccacaaacacttagcttttctcgtttggggagctctagggagcctattcatctttcttggagtcagaaagaggatggagaaatccaggcaatgaaaaaaaaatgtggaagatgcagctgttggaagcaacaaatagaatatcagatggccccaggagtcctgggtatttgtctcagatctgtcacaagccgactgtgtgactataacttgtcacttcctctttccagatgcagtttatgcaggtgtaaaagggagaggtcggatgaggtggtcttgagttggcttccaactctttctatgactcaagtattctaaatgagaaagggtgaagaaaaggaggaaatggaagaagagacggtggatagcaggtgggtgagactttgttagaaaaggagggggaggaaagatgagaaaggctgcaacaataaaaaaggaaaacaacacagatttgcagaaagtattcctcgcagagccataagtaatttcgaaagtagtcatgattacaatcattatcataaacaaccgaagtcctaattaacttcataaagggcagcatcctgcgatgattcaggaatgctctctcttgatgctccaatctctggaacccagggggatccctcccttgtgagctcatacctcctttcttttgctatgacctttactttggggagcccacggaaagaaagaggaagcacctgccctgcgagtctggccagctggtgtccaggagcccagggcagctcaattgagcaccaggtcgcggttgccctccagagacagggtccccagcatcatcacccacaccactctgagcatccctggctgtgggcaccactagtatcagcataattgtcactctgtatcatccaaggagattcccaggtacttccttaagaatggcgaggccttgggcttaaaaatcttctgattcatggaagagccacctgtgatgttcctggctacctcgttttactatcattctcctaacagccattagctcagcttctgccttgcctgacccctatggggtgtactgatctctggtcttatctttttttttttcttttgagacggagtcttgctctgtccctcatgctggagtgcaatggcctcggctcactgcaacctccgcctccaggttcaagcaattctcctgcctcagcctcatgagtagctgggattacaggtgcgcgccacaacacttgactaatttttttgtatttttagtagaaatggggtttcaccgtgtttgccacgctggtcttgaactcttgacctcaaatgacccacctgccttggccttccaaaatgaacaagcaatttctttagttgcttgtgcacagcccagaatgctctgcccctagcaaactgcaagaaaaccgctctaagccttcacttaaggacttctttgctatatttaggttatgtttacaggattgagaatgagaggtagaaggaataagttcaaggacaatttctggaaataaattaggttcaaatcttttcagggaagtgacaggctttaatttttgtttaagtgatgaaagctattgtaatttctcacaaaggcctgcaagtgatttgagattggtttgtaaaaatgttgaaagaaaacccgaatacagaataagataatcctaggaactgtaatgataagatcatatcagtttgtggtgtcttgacattatctgaaaggaagagggtgaatacggatcagagaacaatgagcaagaaaaaccagtgttacccaaaagctaaggggagaggcgggatggctatctcttaaaaatgccaactggaggaattttttttttttttttttttttttttgagacagagtcttgctctgtcgcccaggctggagtgcagtggcgtgatctcggctcaccgcaagctccgcctcccgggttcatgccattctcctgcctcagcctcccgagtggctgggactacaggcacctgccaccacgcccagctaattttttgtatttttaccagagacggagtttcatcgtgttagccaggatggtctcgatctcctgtccttgtgatccgcccgcctcggcctcccaaagtgctgggattacaggcatgagccaccgcacccggccaactggaggcatttttaaagcatacctagtgattacggatagcacaagtatagcctgagaaagtctgactttgggaaaggagttacagtgaattcataatttaggactaggtgaatactagcagtgtcattaggcagaaatggagaactattgcattcatagaagcgtaaaattcggctaggattttttattctgtaatatttctccaatactatttaaaaattttatatgtaaatatagtcattttatctctatatattgttatattaatagcttgtttttatagatttaggagccctatcattttggcttattatatctcagtgttttctcatcatggggagagtgcagtagaaaactggcttgtgcacttaaattgcagaatggcagctgccaggagacattaaactggccccagagtggagttctcagacaatggggttgtgcatctcagtatcagaaatgcctaaagtgcttgttataaagattgtattctcaggacccccaaaaggtcctctaagtttgaactgagacccaggaatcagaatcttttgaagagagacccaaaactcaggttttgaataagaacccatggaaactctattttctaaagatagctgcaacaaaatatctctcatcccagatcctccctgcagtacgatcttgccactataccatcaagaagtaggtctgtgtctgtcactccttgaatgccgatggggttatggctgcttcgatcaacacagtatggtagaagtaacatatgacttccaaagctgggtcatgaaaagtaatgttacttccaccttgttctctggagcccacctacttggagtcccaaaccagcacctaagtccaactaagcagcagctgctctgcagtgtggcagctgggccacatggagagacttatccaggtgttctggtggacacgcattactcttcaagtcatcccagcccagacattgagggaaggagccttcaggtgattccacactagaggataagcctctcaaactcaaccctagctgatgaggacaaacaataacactttagttggaattcacgctagagttcgtcctagtgtcaagaatgataatcacttatgttttcattcattcaataaaataggtactgattgcccactattgccaggttgttctaaaatctgtggatatagcaaaaatcatggaaaattcctcagagtcctggagcacacattctaagtgtagcatgacagtgtgtggctgggtaggagacagagaagggcagacaaaacaactaaataaacacattaacatgataaggtaaggttaacgactatgaagacaataaaacaaggtgatgtggtggggaggcactactttagattgtgtggtcacaaaagttgtttgagctgagacctgtattactttagtagggctgtagaaacaaagtgccacccactggcctgcttaaacaacacaaatgtgtcatctcccagttctgcaggccagaaatccaagatcaaggctgggcatggtggcttatgcctataatcccagtactttgggaggccaaggcgggtggatcacctgaggtaaggagttcgagacaagccttgctaaaccatgttttccttgctaaatcatgaaatcttagaggtcagcaacactgtctagcacagtgtgtgttcaataaatattcaccagactgaatttagtggaatactagtaaaagcttcagtgttggacttcagattgttactggcagtgcgtctggttggggtgcttggtccttggtctttgtcttcttggaagaaataatttggccaagagacaaagtagatttaaagcagaaatgagagcttcttgaagcctggccagcatggtgaaaccccgtctctactaaaaatacaaaaattagccaggtgtggtggctcgcacctgtaatccctcccagctacttgggaggctgaggcaggagaatcacttgaacctaagaggcggaggttgcagtgaactgagatcgcaccactgcactctagcctgggggacaaaagggagactccatctcaaaaaaaaaaaatccaagatcacagtgttggcagggttgatttcttctgaggctatgagggagaatatgtcccatgcctcttactcagcttctgtggtttctagcaaactctggcattctttggcttgaagaggcatcatgctgacccctgccttcattttcacatgagtttttcctgtatgggtatctatttcccaatttctcctttttatataggattagggtccactctaatgatctcattttagctcggctatctctgtaaaggctatgtttttcaaataaaataacattctgaggtactggggattagggttcaacctaagaattttggtggggacccagttcaacctttaacaagacctgaagaatgaggatccatgatacaatagtccagggcctataggaaagcagaaggagaaatgagttatgctgtcaagaaccagcctagaaatcaaagactggaatgtggagaggaatgaggagcttcagcctagctccatcatcactgtggatagccagcagcaatgctctggccaaaagtacaagctgctcagctctcacatgcaatcagcacaaatacctgtcaattctacccatgacatctcactcataacctggctgtcctctgtccccgccagcttggctttggtcaagcatttgtttctctctcctattatttcattgttatatttgtttctttctcctattgctgtttagtcaatctttctgccttcaggctcactatccttccatccactttctgaaataccagcagcatcattttataaaatagaaattgtatccaatgtcacccattctaaaaatcctctattccctccatcagttcaggaggaagaacaaaatctttctcatggcacagaaggttatataaacccagctaagctccagatgatgtttccagcctctctgtaactcacgtgcacccaccattccccagactcgctgtgcactttcaggactctagttttgttcatgcttccctactcttctcattattttttctttgaagagctagttcaaattggcactcacctctaaaaaaaaaaaaaaaaaaaaaaaagcccagccacttttctctactctttcctgaacgcttcccccacctcctatgcctaagctaggcttaattcctccttcatctctgttggcataacactttgttccgtgtttgtcacgttggcttatatttatttgtttgcatattggtcatttgttttccttgctcaaccatgaattcttggaggtcagaaacagtgtctagcatagcaggtgttcaataaatattcaccagaccgaatttagtggaatactagtaaaggcttcagtgttggacttcagattgttactggcagtgcgtccggttggggtccttggtcctttgcccttgtctttttggaagaaattatttgaccaagagacaaaagtagatttaaggcagaaacgagagcttattgaagcacagaaaagtacacttgaagggaccaagcaggctactcaaaagactgagtgcgccccctaatctttggttcagcgctcttacagatttactatttcctgttttctttcccagtctctttccctcatccttcgccttgggcaggctgttggctaatcaccacatgtgcagtgacttgtcagtatctgggaggggctgcacgtgccctttggtggttggagctatgtgcatgctctcttatggcaattttcccttatcagttctagcgcccccagatgaagatcatatgctgcccagactctgccattttgccccttaccagcatgcctagacacctctactcaatttttaagttcttataggtacattgttccccacaaactcaagctgtttcctggttgttaggaaattttcacctctctgtttccagcagcccgacagtcacctaacattctttggggtcctaccctgacctgctcatatctgcctatctacctactctaatacgatcagcattaacatattcatgaacctcttggtcattaacatcgctggacccagaatcagtgttaacatgaacatgcttggcaatgtgtgtgtcaccattaatatggcttagcagatttggcgtctagacttgcattcaagccccaacgttgtaacaaaccttaggaattgtcttggctccatcttttttgctctgtgcctcggttcatttatctgcagaatgagacttttgcttgctaaagacctacaattaggaccatctttcatgctgaagtcagagtgtatataataattggatcaccgtcagcatcagtatcactcttactgttgcttagtcttggggactcaagtgtgggggtactttactgttgctcttttttgtgggtttgttttgttttggcttctgggttttgtctgtttgtttttctggcaatagcttctttgacattgatgttacctttagcatttttagacccgtgttagaagaatgaaatgattaagggtgtagatttgcatatttttttgtttttctttttttctttctttttttttcttttaacttagaagctcttcggtcatggtaaattaaagcaggttttctgaaaatttaccacacaggaagctgtgctgaacttctctcctggcctcctagaccctctctcattaatttcctctaattctcattagcatgtttctactgcagactcggaagcagagagaaattcttgtgcagctaatttaacacctgcagattttgagagttggtagagaaaccatatcaataaaataatcactggctttctcggagattttaaatttgaatcctttaaaggttagacttttgttatgatttctatttatgtttttacatcaagttatatgttaataaatactcttgtcttttcaaatgtaaagagaggcagaaaactggaataaccatttttgatatatcaatggccatagtgaagaaagtattctgacattttggatgtggatatggcttttctcgttgacagcaccacagcctgccttagaaagcccccacaaattcagcttgggggctacaaggtgggattaggaagtgaggcacagcctgggagctgagttaggtcctttggtttggagatttgtcaggcaaagatggaagctggaaagctccctcctctactgaagtccatgagcatgcagtgtagcaaagaagtgacgggtgggaaaatcttcagaggttttttttttcttttgagacggagtctcgctctgtctcccaggctggagtatagtggcgcaatctcggctcactgcaagctccgcctcctgggttcacgcctttctcctgcctcagcctccctagtagctgggactacaggcgcccaccactaggcccagataattttttgtatttttagtagagacggggttttaccatgttagccaggatggtcgtgatctcctgacctcgtgatccacctgcttcagcctcccaaagtgctgggattacaggcgtgagccaccgcccccggcccagagttttcaagtatagtgtttgtggcgagttttactcctctttttcagagggacagagaccttattccccaacccttcaaacaaacaaacaaacaaaacaagtgagaggctgagaaggggattccaagagcatcactaggagagagttcctgcctactagagggggagactagcctggggctggatgctcaggtgcaggccactccgaactgccctcagagcaaggcaccaagtgatgcttcttgggaggatctgaccatgtccttgggaatgataagggcacagtgacagatagcttttcctttggtgaggtctgaggggacaaaacttgcaggagaagccctcatcaggttgggagagagtgcccaacagaggatgaaagacctgcattccgggtctccaaggctttctgaaagttcgaggaggaacctaatcatccccagtcatccctgtattcatctgttctaatgctactaataaagacatacctgagactgggtaatttataaaggaaataggtttagttgactcacagttccacatggctggggaggcctcacaatcatagcggaaggtgaatgaggagcaaagtcacatcttacatgatggcaggcaagagagtgtgtgcaggggaactcccatttataaaaccagcagatcttgtgagactcattcacaatcatgagaacagcttggaaaagacccgcccccatgattcaattacctcccaccagatccctcccaggacatgtgggaattatggaagctacaactcaagatgagatttgagtgaggacacagccaaaccctatcgatcctgtagaggatcatctaagttagaagagtaggcagatgctgaggatatgctcgggactgagccaggcatgcacagccatacccttcaggaagggttgacggtatggaccaccgacaggtccaaagggaaacaaacaggatgttagtgacaaaagaggctgtagtgaacttgcacattatcccaggaaggccttgctcacatctccacaggtgccaccacatttctggagaccaaatagaaacagataaaattgtgtctggagttggttccttctggtgggttcgtggtctcactgacttcaagaatggggcagcggacctttggggtgagcattacagctcttaaaggtggcacagacccaaagagtgtgtggcagcaagatttattgtgaagaacgaaagaacaaagcttccacaccatgcaagaggacccaaacgtgttaccgctgctggctggggtggccagcttttattcccttatttgtccctgcccatgtcctgctgattggtccattttacagagtgctgattggtccattttacagtgtgctgattggtccattttacaaacctctagctagctacagagccccgattgatgtgtttttacagaacactgattggtgaattttacaaacctctagctagctacagagcgctgattgatgcgtttttacagaacactgattggtgaattttacaaacctctagctagctacagagtgctgattggtgcgtttttacagagcactgattggtgcattttacaaacctctagctagctacagaaaagctcttcaagtccccactcgacccaggaagtccagctggcttcacctctcagaatgagatggaccccacgagactaggatgctacagaaatctgatgattagataaggacatctcctaggaccctctccctcgtctctgccctcatagaggaacaaacttggaaacatggtgaggaggagaatccggaatgagaccatggtcccatcccacactgcagggaaggagtgaaagaaagcacaggtctcctttccactagacagttatagggccccaaagctgatgatggtggagacaaagaatttaaaataggatgtttgattaaagccttacaccagattggacttttcataaagaaaagcaaccagaaatttgtgcaattcgctcaagttgtggccaaggggacgggaaaaagattcaacagagtgtgcttaaaaacacttataggaagaacaaagctgatggatgttgagaacccgccaagctctgattgccaagctaactgaattccaggaggtcattataataatgtcactgggaggtaaggaataaatgtgacaattattaaacacaccacacacacttaagcagaatcaaacttcctaaaaattctcccaaattccctttgggaagctttctctttccaagtttcacacatgttgcagctgttgaaaaatgtcccctctccctacacatggtccctccactgcccccatggcctcctttgcaaagccaaggcagtttggctgatccatacgcccacatgagccctggaaggttgaacctttctgcccaggctgaatttacagggaggaccagcctatgggaagtgtaagggaatgtcaccgttcatctgcattaatttcttccttgcctttgtgacttgcacattcaggatatttgcccatttttctatttctgtttttcaaattgtcttatcaaaacattttatatgagaagaacattagttctttgttgtacatgacacaaatatggttttttcttttttgctacttatatttcaatcttctttttgtcgtcgtaaacttttacaaatttaagtaatcacgtgtatgatttttttttttagttttcaagcactccagtccaagattttctcttttgatgttttgcttgcttcctctacttctgaattacattcaatgcctcaagtctgtgtgtttcatgccagccttcctcctgcagttgttcttcattctgtgggaggagtttggtaagtggttccttcaatatataggaaatacaggtgatatacttgctacatctttgcttgccttttcttttctttctctctctttctttctttctctttctttctctctttctctctttctttctctctctctttctttccttctttcattttatttcctctttctttcatttatttttggcccctgtatttttttgatagcttggctaggtatagaattctatattcaaaatagttttccttggaagtttgaatatattgttcctctgcctaaaacccagtattgctgaccagaagtggatgtcagtatgcttatcttccctgtgagtgacctctctttttctctccagaagctttaagaacattcactttatcctttaagttaggaaacttcagcaggatgggtctatacatgagcgattttcccattcatcattctccatactcactagacattcaattttaagaggtatgtctattatccactcaggggattttattttatcttcaatttctacatttctataatatttttacctttttatgcctctgttctctcctagaaaatctattagttgctgttaggcctcctagatttgccacttttaacttttctctattacatttcacttatctttttgccccaagttctgagagatttccttgaccttatcttccagatcatcaacttgatcttcatctctgtccatattattatttaatgtataaagtgaaatctttattattgcaggaaaagcttaaattcaaaaatgatttttaaaaatctgattaatatattttcaaaagagactgctcttaatttgtggtaacagtatcttctgaagcctataggcagaaatcagaataattttaaacagttctcatcttctccccaaagattcttttattcccctgcttcatgctgctattggtttctttttggtttttaatgaagagttactttgatatgtgcagattatagatgtgcatttcctcagcagttgtgtgtctcttttacaataggcctcttccttaaatagaaagtctaaatatgagctctcagtcatcaaacagggtgacaggcaggctcccttgtaatgcctggagtccagaaacaaagaaacaggctagggagccgcataattgccaatgcaaagccccctgtgagtggagcacctggtgctttggttctctctgtttctcttgcattccccaaaaccatcaccaggagttcacatagggtagattaaagactatgtacatcactcgtttacttctcccattagaaggtggagtttgatccccctttctttgagtctatgggggctatatgactggtttgatccagagagtacagctgaagagacattatcagttctgatcctgggccagctctcacttcctgtctcttggaacacttgctctgggaaaagtcagtcattatgtaaaaagtccaactaccctgagagcaccatactgcaaggaagcccaagcagccacatggaaaggctgtatgaagagatggacatctgagtagactttggatatcctagccacttggacggcttgcaccataggcaccagaggtatgaatgaagagagattcagatggctccaccagccccagccccatgtacctgaacccacatgagagagagaacaaaaagtctgaaccagtcaagccacggaaaggtgagagataggaaatcattttcaactgtttcactttagagtggtttgctacaaagcaacaataatagatcatctgtttttgtttgtttggttgtttttgttttttattttttgtagcaacagatcaatcactctctctataaagtagttctaaagctgcagcccaaggataaaacttgtagctctcagaaactctgtttaagggacaagggcccactgatacggcctttcaaatgcaattcctcaataaatatcttgaagatgatctctcggtccattcttgcatttggggactctaacttggatagtctcttgtctcctttgacaggacggatgcttaactctagtaccttgaactgtgatttttctactttttctctggcaatcaaataaagtctacactgtgtccttcatgcagtcctccaaattcaatagttagtaatagtatctatttttttccctttgctctgttacagggtgtgtgtttgtgtgtgtgtaattttaatataaacttgggagaaaatggaagtcaaattctgtgctcaggctgccatcttgaaccagagacctattaaattcctaaatagaacactgtgttagaagggctattcctgtattttagacagtttaggagtattgggcaagtgaagagtatgtcacatgctaatgtcccatgaaaatcattacctcatgcagaaaggcacttaaatgaatattcccgagggagagtgttaagttctcccgatgttgcccaatgctggccttgagcagcataaagagcagcatcagagagggagaaaatgacacaggattttatgcccagtatgaaagttttacaggcaagcccccaatctttctgcaaatgtgaagagtttgtattttataattcaggtcctcctgttgaggggaggggagcaccaaactattatccaatcttttgcctgaataggaagaggagatgaaatacatctttagaaggagagagatcgggcaagtgcccactttgggttgtatgcccaggttcaaaggccctgggcaggagagagacaaagtaccaaggaatagcctgagatgactttctatgtgaagcaagaattgcattagctgtaatcgcttgtcatgcttgtcagaagtttcttcagagatgcaaataactcttatttaacatattagaggtttaattggcttctgtttctatttttaatgcatgaatcctgtggtctctaaggtctatggggctgagtttgagaagaaggggtggggtcccagtagacaaatttccaagaatgaaaatataaaatgaaggaagtgggcagttctgacaggtcagattgaagtagccaggtttcctgggaaggttaaaaacttggtgcctcctaaaactgtgatataattggagtatttgctgatctatttgttcataagcactgcttattgtacagttggtacagcatgagggaaggccacacgcatgggcctagcctattttctcatccagaacattcagctctgaatctgagccttgagcattccatgcagcaaaaccaaagccttaccatttaccagacctagtctcctcagaaggccgtagattaatactattattgttattgtgggactcagaaagcaattccccaaaatgaagtcctcaaaagtaaaagtttttctctgaccttctcctgttctcctgtctcagtcccattctctccctattctaaggctagcaatggaaactagaatccctcttccccaaagccagccataaaacctaaaaatattactttagctttccctctgcctttctgtgtaaaacatggccataaaaaaataacccggcctattttgtttgactgtaggtcacaagaccctattccaaagagggtcctgccccacacccagaaggaagaatgccaagtagaatctagacagacaggccctgctgggtttctccactcagtctatcagcattagatcttattcattttgtccagtcatatttctgcatggctgtccctacaagttgaacctaagcataaccactgacaatttcccctatatgcttgggtcttcattctgaagtctctcatgtacactttaatacattttgtatgccttttctcctattaatctgcgttttgtgagttgacatttcagtgaatcttcagagggcaaaggggaaattttctcttggcccttacagtatcatcagaatgattgacattgttgttattattatgtggacaaattttgtggacgtttgccccccaagcaacccatcagattattccctccaactcacttacatgtctcttcctaaggacattctggtaaatacaatagtctctaccatgttttattttcagtgatattttagtggccttattgggctggtgcctctacacacattccattggcctgcctcttaatctaggtatgttctggtctgactttcagaagagaatgatcacaaaatatgagtcagtgatggcttaagaaggatcagacattgctccacctaaaaatcaatacagctcaggagataccattattgaagacatttaagactccttctgtctgggtaggctcaccacgattttcccccaatcctctgtctgtttcctgtagcagttattttcaaactttaaggggtttatgaattaccttgggtatcagctaaaaatcagattagaaattctgatttattggcttcagactgaggcccccaaatagcattttaagtaagaactccaccctagtaaattttgaatcaggtggggaacattgactttattctaagaaataatgctaagccgtaatgggcacacattaaacaaagtaaatcttacataatctggaaagctgggtgtatttatttaagatgtagaggggctaaaaaaaagaaatattgtgtatccatagcctggttcataatggagagcagagacaagaaccctgaagacaggaatgaatggcagataccaaaaaggaggttaaattaatcaaccactggcaatcacagttaacacaataatcttggaagaaaatgatcccataggaggcaccctgagagccatgaggagacaggattacttcaggaagaagagaattcatagaaaagtcttagtacagcctggagaatgaatgaaccaccaaatgtactgtgtcctcaggagaaacatcacaggaaaggaaagtgggaaagtgtaaaatgtgttctgtcccagaaagttttatctctgttttcaagtctcatcaattggtagtggctccctggagcactttatcaagacagattgtggagtcatttctaggtttagcagaaagggattgattgattagttatgattgattagttatgtctgccacaggataggatagggagaagcaaatgcatccttgcaatttctgcttaggcagtaattgtaaagttatccaaattccactgtagcaggtagactcagtcatgcctgataagcgccatctctttcttgctatttccagtcagagaaatctttgccatgtgaacaatataaatgcatcctgagattatgtttcctctgctaaagatggagccatgtgaagaaaatctcagatatttacctggtggaaatccagacctgttgtacttgcccattctccattacagactcttttagccagcccttctgtgctccctgcgccgctcaattttcccaagaagaaggaagggctgtagcagtgcatctctttcctgccccatttcctgctcaattcagggctttcattgccattcattccccatttctaccccagtgatttcaagatttcaaacacataaacatgaactgcactttacaaaatgtgctttacgatatacttgccttcaaagagcaaactcttttaaagtacctacttaaaaaaaaagatcagtgtgtgtacatataattgagaggctaattgccaatcaatcaaatcttttcattcaagggagcacctgtcagcacttcattggcctaatttgaattactgcaagtatgtgaaaaaagaatctgcagtataggatattttaaaagaagtgtaggttgaaagtcttctataattcagatttttctccagttcaccttcctcaactgtagtcaatgtttttggtagctttcttgtccatcctcccatttctcagacagttctctcttcctgagagctcccaatcgtggttagggatgcatgttcctccaggaaagctgattccatcttagtcctagagatagagcatatgacaaatcactgcaatctgcctggccaccgtgattgacccgattttgggcatgtgactgcctatccaattaaagtaacacttaggacatttgctgatgacaaagatggtgtctctttcttgctggaactgtgagttgtataattattgtcgaagcttctggaagccatcttagaataaagagtacagccaaccatagtggcagacaacactgaaaaaagcatgcttgggagacaaacaaacaaaccccttagtatttgatgacattattgaattgcttgataaaataaacaaaactaaagccaagactacctatggatctttcaggcaaatgagtcagtatattttttctcttgttaagcccggttttaattactttctttcttctctgttttttgcagcactagctgatacgtttagttaatctgaattaggagaatccatttcatcagcattgtacttgtttcctatgactcaacttttccttttctaattttcttttatgaatgaggtttttggaagcagggtaataaacagctgataatgattgggatgaaaatctcagtcgtgttccaggagatactttggaaaagaatatacatcttctgaatcaataccatttacatgctgctaacaggaagggaatgagagatagagtggttttgttgtagaagaaaatgcttgcgtactatggggaggaattaattatgcaaaatagtgaaatatgtgcagacaaatgtaatttgtcaacctgaaaactgagcttcgtaaatcttagtttgcaataaattgagtgattttcaaatatattagacaaatgagctgaaactctgatatgatatgtgtatttaatcctgtcacccatgcgcatattattttccatgggatatgaaacccctgacctccagggccagatgttattgcatcttttgtgaatacgtctgtgaatattgcagcttcctgtttttgccacagtaactgcatagctgctgaaagaataaaacagtctaatgaaacagaatcacagatttatacatatgagggggattcagggaggagtctacccagctagtgttttcaggaacactggaagtgggtgcaaccctcaggaatttcatttgcacttcagagcagaaaacatagcaggctctatgaagacagttcaggaagaagttactagagacacacttttcctgcacaagtagcttcagagtcttgcataaaaggaagacacctaagagagaaaatggagagcatatgcaacagtaaactgttggcctggaattgctcttgctcaccttaggaatgtagctatccatatctggatatcatggtaaggacctaaattttgtctctgggcttgcagcacctcctgcatccagccagagagaagctacagagttaatgctggagctgggctaggattgcaggaaagacaaagcattcctgtaagtttagaagtgctcctcttctattcctcctggttacttagacactccattggtaaaggagaaaggaacaggaggtgtctcatgaatgtacttaaggagataaagtcaggtaggagtcatttcagcattcaagatgaaacaggagggaaaaacaaggcagggacacttaaacatctctgttttatttccttgccaacatgattttggggacaggactggtgagcaaagccagtatcactggacaccaggtgtcctgattgtatcactttaggtgaaaataatttttcactctggccaatgtatctttctctgatgccgccttcaccagctcatcctcataccctgctgcccacaaatgctcaaactcctcctattcctgtagagacagtgtggctgcagtgccagtcactcagaaagccttgccgagaaagcgaagagcaagaggcctcggaaaactctggtggtgattcctattcaggaaacggtatttttttagtgcctcttttctttaaatatatttgaagtaatttatttttgaatataaattagtgtgtgtggcttaacatctgtaagtcatgacatattatacatagaaagaaaaaaaaaacctctctaccaccttgtacccaaggaaaagaaaattcccctttcagaggcaaaccaatgccattcatcttttctatattcttaccgtgatattttaagcatttactggcttaaagtgatgaggatacacatgttcccatttctatgtaaatggtagcatatcacctagactgggagtccccaatcctagggtcgtggaccagtactggtccgaggcctgttaggaaccgggccgcacagcaggagatgagcagcaggcgagtgagtgaagcttcatctgtatttacagctgctccgcatcactcacattagcgcctgagctccacctcctgtctgatcaggttttttaatttagggaaaaaaagcaagaaatgtgacatatgtactactcaagcgtggcagttgaaatgtacgcctttaccatatcctgttggaacagtgtcaataggaacagagaatgccaggtctacaattttctacccattttacagacaaaggaactggaaacttgcaccaggaaagttaagtgattgataaggtgaaggatccagaggaaaaccccttgatttatttcaaggatactcctactctcctggagtgaatgaattcctctttgtgcatttaggcagcgtgatgtaagctggtacaacataacttttctagtcattttgccacttagaagacattccccaagccaatgacatccttccttcctttgaattcatatgtcacttccaacctccttttctgtggcactcaaaattttccattaaagttatttatgtatgatatgatgtggcaagtatggagacacccaggtgacctatccagcttcagcagctagggatactgacagggaccacattttgagatccaaaaatcggacacaaagtatttttaattgatatgaaaggccttacagagacatgaacattaaatggcatttgattacacactgaaagaagggtcttgattaaagagagaatattatatggaatcatcatggtcttggaccattcatgctctctacagcccccagcctgaggtcggcctgagcttgcctgctgtgccagcctgaggtatgcctgagcttacctgctgttctccagaactgagagctgtagtccaagcccaggagtgtccattttgcttctagactggtctgagatggcttttgccttgggaagaagctgcaccttcaatgtcccttcttctccgtgcctgggatctgggaaggctctcaagggggttgtttctccaagtggagttctctgcatcatcgtgccctgtgattatcaagttagctcaggcagaagcatcctgcctacctggcaaatcctgagaagaaggctgggagagtagcagcttcccctggtgagccatctcaagcttgtttcctctccattatcaggagcagctctgcgggagccttgttaagaagtgggacatgctctctctttcctgctcctacaatgccaagggaagactttgagggccctgctgctggcagagctgccctgcagagctggggtgcccagaccacagggccttggtatggcaagggtctgtgaggctgaactgtccaaaatgtctgtcctggggaaggcacaaggagaagggcactcagagccagagatatcagcagcttcctgttccaaaaagaggatggctgaagggagaagtgaatgacgcccagtgtatcccacaaggctgcagtaataggtggctgaaaacacaaaaaaggtcattggtcaccgtttccctttttgtaataaagggaagggtccgagcacctgaaggcactcctgtttgaccccagaagcccacagctgttccctggccctgtgtgctgggaggccctgcagtgcctaccgctgcactgacagggaagtaggcttgctcctgcactcacttgctgtgaggctgacttccctgggcctgacatctcacctgcagaacgtgaggacagggccaccacaaattaaggtggaatacatcacagactcctgcaaatactgcactctatagatgaccccgggaggtcaaattagacagctactcctggggtttgggcatctgttcccctctcacttcagaccagagctccctccctcctgccctgccctctctaccattccttccttcccttccctcccttctccctcttttcctctccctcttattctctttctcttacattcatttcaagggaaaaagacactcttccatggcaggctcagagtattcttaagctacataagacaatctcagtgccagtgtggtgagatcacaaatctctttatattacatctcaggctctgccgagcaaatgtattgtctttgctgtctagaatgactctgtccgccctcctgagctaccttaagggttgctaaggaagcgccagaattatatcttcatccaagaaaatttaaaatgtagtccaccccattcatggtttctttagattttgagcagacttttagagatcactgcttggtcttttaaatgctccccttgttcccttgtcccttgtccctctccaaaggtgtcctggaaaatggaggcttacaagaccttctagggtgaggatgtggggcttcaatctcaagctacctctccagtgtgcatgagggacactgcagcttagtagggatggccctgtcactggttggttgatgctgatgcctgtggctgaaactctgtggtctctgcttttgtggctgggcaagggtctatcaccgcttggcctcctcttccctcttgctggtgccatgcttcccactgtgtcttgtctacatcctccatctgccccctggcccaggctgttcacctctcaacctctactgtgtgttcaactcatcctcctctcagtgggtcttgaggcacttgcatggtgtccatgcaatgcaggatgcgaaggccgctcaggggggtgagctacacactgcccaaccaaagacctctccctcctaactctgcagggatgcctcatgttgcacgttggtatgttataattacacacgtacatattgtatgtgtgcagatggatagatattaacatgttagaaagggaaatagggctgcaggtctaatggtctctagtctctctccccatcttctgtttccactttcctctctgccatcaaccacaccacaataactgaggtcagaaagacctcctaatgtcgttcctgtctactcagtccttctttacttaaagctccttgagcttgccggctggccttaccttggctgtgttaagcgggagccaaacaatgtaaaacatcactcctttccggacaaggcctggctctccaccctgttgtttactttacaccacacacgattttgaggtcagaagcattctctttgctccccttccaaacagtccttttgcattcctgccttatcaaaccagtcccctctgttccccagctatattaatgccttgagtctattagggagaaggtcatgtacacagaaggacaaaagaaaaaagcacatcaatgtttttttaaaatattgtccctattccctggaaaagcagagcttcctcctgccaacacacacacaaacacaccccttctccatcctgctgggccctttggggctcttccagaccaggacagaaagccttgaggagaaccacattgccaaggagaactacacatgttttagggacacaaggagggggtttctgttctgctggcaatgtgcatttttgacctgggtactgttaatgaaaagtgcaacccagtgcagtggcttgtgcctgtaatcccagcactttgggagactgaggctagaggaccgctggaggccagtctgggaaacatagcaagaacccatctgtacaaaaaataaaaaaaatagctgggcatggtggcacgccactgcagtcctgctactcgggaggctgagatgggaggatcagggtcttaagcccaggaggtcgaggctgcagcgagctgattgtaccactgcactccagcctgggtgacagagcaagaacttgtctcaaagaaagaaaaaaaaaagtgcaaaagcacatccaaggcaggaagtcctggtcaaagcacacggcccctttgggcaaaatgccatcttttgcctatgaccatggtctgctcaattctggctttccctatttggccctgtttttctggtcttatgtgggcctgagaaccaccatcctccttgtccacgtctccaccccagcttggcttcctttcttcaattctgcactcttctcccttatggctttgcctggtaatttttgcttccctgctcattttcctgggcaggcccccttgacctggtctagcctggtttaattaaagagggcatctgcatgcctcccccagtccaagcctctctccccagctctgattattcagttctgacaagaaccctgttggctcatccagattccaagcattgagtggaattttatcaccaatgagggctaagtgacaggggaaagagagtggaaggagagggaaaagacaaggcagtaattgttagccgtattattttgaattagacaatcctgaatttgtgcatctattttttttttttcgagatggagtttagctcttgttgcccaggctgaagtgcaatggcacgatctctgctcactgcaacttccacctcccgggttcaagtgattctcctgcctcagcctcccgagtagctgggattacaggcgccaccaccatgcgtggctaagttttgtatttttagtagagacagggtttcatcatgttggccaggctggtctcgaactcctgacctcaggggatctgcccgcattggcctcccaaagtgctgagattagcccagtcctgcgcacctgttttttaattttttttttttttaatctgggaagaaagacaaaaagctcaaagcagtgcttgccttagtatttgggaaggaggagctatagatgagtttggggtgggtgggggaaggatgtgaccattcaagagacctttggctttatacctagtgtttcaattttttaaaaaagaatgccttgaattattatctgtaagatcaaaagaaaaaaaataagtatacttgcctaaaaacaaaagataaatttttgcaaaataaaaatgaataaaagccagagtctacatacataagatatcaacattgttctgtatactccaataatgcctagcctgatgttgtctctgcactggaccctgagccatatcttgtccctctttgtatctctagtgtcaaccgtggacactggcagggatttggctctctaggactgttgtaaaggaaaccatttgactgtttaaggggtagcagagaaagtaaaaaaaattcaagaagtgggtggtgaggaaggaacaagtgagcagaagtaaaaacaaagggagtgggccaggcgcggtggctcacgcctgtaatcccagcactttgggaggctgaggcgggcagatcacgaggtcaggagaccgagactatcctggctaatacgctgaaaccccgtctctactaaaaatacaaaaaattagttgggcgtgctggctggtgcctgtagtcccagctacttgggaggctgatgcaggagaatggcgtgaacccgggaggcggagcttgcagtgagcagagatcgagccgctgcactccagcctgggcgacagagcagcgagactccatctcgaacacaaacaaacaaataaactacaaaaaacagaacggagtggactctgcccctcggccaggatgcctgttctttctggaaatgaacagcaaaatattgggactgggtgctctgctcaatattattaccccagtgcttcccttaaggtgctcctgtgggcaactgcagggaactcatcaagaagaatcttcttccatggctctgagcatggcggaaagtaggaatctctgccagccatggaggaaaaatgttcctgtggcaatcaggttccaactcatagacttgccacactctgacgatctgcatgtgaagtgtgaattgctccaaagtgcacccagattgggagtggggagcagtcaccccctccctttaagctaccttttctctctatttgctgctgcagatgacaacacaattcttgttgcattgatttggctgggaaagtgagaaaatggcggcaacattaattaaaaataatacgccacacaagagatagcttgaactcacttcttctcttagtatcctctgtgttcccttcttttcaacttactgtggacactataggaacaatgtgtctttcagtagacatatgaaagaaaagcgagagatattaaagaaagggctctaaatgtgatgaagagcttcaatcttagcagcagacttttaagacactaaaaggaatactagagaatcagagtgaaataattgggttcctaaggttagggtggcaatagagagattggagggaagtggtataaatggaaaatttaaaaaaaagagaagtaatactattctccaataaaaagaacgtggggtccttggagaaatggctgagtccagggctggggcaggaaacatacaagaagaatctagaaggtcttatagtgctgaaaagtaaggaagtgctcaaaaataaatcaaaacaacaaaaattcccaactgggaaatcaaatggacacaagggacaactaacagagctcccgatgggcaaagagggaacgatttgagcaagacaatgaataatgtggcattttagttttagttttagagacagagtctcactctgttgcccaggctggagtgcagtgtcacgatcatagctgactgtaatctcatctcctggtctcaagccatcctcctgcctcagcctcctgagtagctgggactacagatgcatgccaccacaccgggctagttttttaaatttttatgtagagatggggtctcactatgttgtctaggctgatcttgaactcctgggctcaagcaatcttcccgtctcagcctcctgaagtgctgggattacagatgtgagccaccatgcttagtcaatatagtattgaattacacctgaagtataaatacccataagtctatgctggtataaataaatgattgaaggtataaattaataaggaagaagaaacaaatatcctatacagaattctaaatacttgatgtagctatacccccttaaggtgactccctacaaagaggatggcatgaagacaggaagcaaaaggaaactttgcagtggagaaatctgacaaacacgacctccccagggtgatccaggctaacagtattatgcataaatcatgttaatagcatgcatccttgatatgagtggcatttcacctcagtggtggttccacccccaaacccataactcctgcctaaccatgagaaaaaaatcaaacaaacgcaaatggaagggcattctatgaaatatctgacgagcacccttcaacaatgtcaaggtcgtcaaaaacgagaaaagtctgaaactgtcacagtctggagatgcctaaggggggaaatgatgatgaaatgtaacgtgggatcctggagggggtcttggaacagaaaaaggacactaggcaaaactaaggacatcaggctgaagtgtggactctagttaataacggtgtatcggccgggcgtggtggctcacgcctgtaatccagcactttgggaggccgagacaggtggatcacgaggtcaggagatcgagaccatcctggctaacacggtgaaaccccgtctctactaaaaatacaaaaaaaaaaaaaaaaaaaaaaaattagccgggtgtggtggtgggcgcctgtagtcccagctacttggaaggctgaggcaggagaatggcgtgaacccgggaggcagagcttgcagtgagccgaaattccaccacggcactccagcttgggcgacagagcgagactccgtctcaagaaaaacaaacaaacaaacaaaaaacaaacaaacggtgtatcagtagcattgcttgccaccataaatgtgaactactacatgaaactgggtccagacagaaaaggaaacccttacagttgccctcacagagccaagaaaccacctcgatcaccatgctgacattgtaaaaatgtataacgatcacagctgcacttttaaaatttgatgctgttctaaatgcctataatgccgggtagtctcttttagaagtgaaagcaatagttttggctatccaatttatttgttccagccttgttgacagagtgggatgactgagccgaagaaggaaaaaagccactatgggggaaggatccgtgaagttgagggacatagtatttgaaattaaatgatcctccgaaatccacaaccccccatgtgcatgctacacaatgtggcttttcttttcttgacctcccataagactgaagttttcctcttaatgttgaattcataaagttattttcacttaattatatctgcttttaaggggattttctaaaacattcagttctgacccacttagaagttcccttctgtttcccgttttgtctctgactttttcctgtgtgcccctttgtttcctagttaaaatcacagcttctaaagtaagcaaggaaaggattttgttttcttaaacccatttaatgcgggagcaaatcagaagccagctagaaaggccaccacctctttatttgtggtgttaaccaattaaaaggtgttactctcttggtagtaaagtgtaaccttgctcttctggattctttactccagcctcttttgatttgtcttgttgtttaatttgctagcttgaatcacactggacttagttgccaaaatcatccggagctccacttaagtcgaagcccttctctgttggaggaaaaatattgaaccattccttcctttacttggagctggctgtcgctggagctagtaacaaagtcaatgccacagagagctaattgctgaaacctcctagaacagttgttctccaccagagagctgttcatacgagagctgtaccttccttaacttttatgcaccaaaagggagagtaatatccagacggaaatgataaagcaagaatttataactgcatttatccaaatatctagataattgagataataaattgcataactgccaccatgccctttatgcccctgttccctttgtatttgcatgcaacgctaatgagatatttggtcatattttaatattacagaggacatgcactgtgctcctataacagcacatcccttgctgctagaacgggtttggtttgacttttgatccagcccttctgtttttatgtaaatgagagatttggcaaaataagaatgacaacaccttttattaaacttgtgggtttccaaaatgctttcacattcatgatgtcatcagatcttcacaacctagtgttgtatgaaaggctagtgttacattccctattttacaagaaaggaaactgcagtacagaatatcatggactaatccctgagctggtaaaaaaagaaaaaaagtagctttaagactactttttaagcttcaagactgaaataaaggtcttccagatttaattcttaaggtttttgtctgatatgaatgtttacatattttcttttgggatctgaattcacttgattgtctgatgaaatgtctcctgaaaatggcaggtacacccggagagacacacaattttgctcataatttcaagaggtttaccatcagccccaggctaagaaccactgttctatgctattcaatctctataacggcaatagggcaagaaataaagaaattctgaaatgggctgggtgcggtggcttacccctgtaatcccagcactttgccaggccaaggtgggtggctcacttgagcccacgagttcgagaccagcctgggcaacatggtgaaagcccgtctctacaaaaaatacaaaaaaattagctgggcagggtgacacatgcctgtagtcctagctactcaggaggctgagttgggaggattacttacagtgaactaggattgtgtcactgcactcaagctggagtaacagagtgagaacctgtctccaaaaaaaaaaaaaaaaaaattctaagatggaatattaagcactgagaagatgagaattaaaaccaagttcctttggttcttttccaaattttgtttcttctcctgaaatatatggtctctcagaagggatggcttatcccgaaattaaatgtgttaaaacatgtcctggggggaaatatgaaaaaaaaatgggaaaatgtagatgaaaaaaaaaaacaacaatctaagaagatatcaaaccaaagtgatgggaggaagtgtgtagtgaagggaatataaataacggtcaatgagccatctgaatcatggcacctgtgcagccaacacgctgtgctgatttaagaaatctgttcaggggtgggtggggggcctaacgaggggcttgggatagaagcagaggtggaggaatagagcgtggcctaccaaacaggcaaacagatgccaagtgggcacagactcttctcacacttggcctggtgggatgtgtcccacacattagtggcatctgtagctatttgtatctgcaagccctggagaacccatgctttacaataaagaccagctcatgccgagagcttgtgagccatttcttggccagggttcctgtcactgtgactggacccagagataatgccttgccctgcctgtcagttctcatgagcatccttattcccaactgctggatggacattgaggcatcacctttcctgccctgaggcttccagtctgccgggtttaattcaatgccctgtcttgacctccttctcctgtgtaacctgtctgggctgactgcctggctgcaaatgagttctctgcttcattctccacgtgtgagcttcactgagtttgcgtccattctaaatggcctgagtacaactctaatgtaagctcaggattatcccagtcccagtttctctctgcgacctgtgactgtccacaaccccatagctgcctccgccacaccaatgccaccatgaccttgccctttagcccctggtgtgcacttgccagtaggggattcctcctgaatagagggtttgcagggaattccttttctgtccttaagactgaacttctaggaggtggacttgggtcagggggctggggtgtaatggacagcagtgtgaaatgagcaggcactatcagatgctgaggcaggatttgcaaaataaattggaaaactagaacttcaagcaaaggtaaaaaaaaaggttctcaagttctctagaaattccattttcaagcatctttgggccaatactccctcctttaattggtacctgtctctcacacgcctcacctcagtactggctgtgtctgcccatgtggttatgtaatgtcttgatcagggtacaggatatcaggttggatgtctgtccactgcagtaatgccaagatcaaattagtaattttgaaatttgatggtgcttaacaataagaaaattggcctttttcagcagcgttaccttggctattttaatgatgacatttttctgttccagtggttggcacttagcttggcactcaaccaacaggtggtccatctagatcgtgtctacctgacacagaatcaagaatttctgttcatgcatttgtctgtattaatgaccaatttgtgcccagtcaattggattagataagtgggatagatctaattagtcaactcattttctttttcctttaaaggacaaaaaaaaaaattaaaaaaaatcatatacaacctattctcccaaagatactactgtctatggtgggcttaacttcgtaaaagtcagaaagagcattcaaggtgatctaaatgatactagacacaagagccatcatcgaaaggtaggaaacagaggtatgagaaacagtttatattaacatagaacactagttaatataaactataagccaagaaaatgtcacatctatgtgtaatgcactcacaacaggcctcctattttaatagggaaatgtatttttataggttaattcatggtggttttaaataaaatttcaataaattccaaccaaagagaaaatgtattggtgatgtatataatctgcacgtgaatatctgggagtggctgcatgattatctttggcattcatctgcacactcttcattagtacctttctcaggaaaagctaaccccagtgtgcatttattctagttgtaaagaagtgatgtctttcggtaaaaagcatgtaataaccggtgatattcgtgccccttgtagtctcaccttcatttcacaaatgtttcagtttggggcaataaacctgcataattggaacagaattctaaaaccatgtctacataaagtaatagaactatgcttgaactgttctgactgtcacctctcacagggctgttaggcaaataggatttattccttatgctaatttcaaccatagttaaggcctgctggttatttggagctttgggtgttgaggggctttctggggctccgactggtctcagtgggaaagggttccacaattgattagtgatgtctggcatgggcacaggaggggagagctgtagtatttaacattgttctagtcacaaggaatgactgcaatattatgcagagaaatcacattctgtagacccagctaaatgtgtcagttgaaagtgattcagtccaagcttgtccaggaaacacacaactaaaattagttgtttgtgactcaacacatgtttggggatgcagaactgctttatatatgtcaggaagggaaaagaaaaccccacaaaactttcaatcatttgatgatgtaatacaatcttactcttaagatagtcagttgataaccagatcagttccaagcagtaggatcataaattctgaagttaaaagtataaaagtgcacagatactcaacaatcattgctattaatgctgctgcatcagatgtgaagaaaaccacatttgatagtcctatgtgaccacaataggaaaacagccccttttaaggagtgatatttttcaacaagttgctaagacattgagttaacacgtggcccacatactagaaccttcaattgagtttccagaatgtctcccgaagtggattgaatctgcaaacctgtcctcctggtagtgtagttcatgacctaatggaaagaatccatatcccagggagcagctggacattcagcaaggagggaaaaaacatttctctctgaagagagatgctttttactcccaatctctggggtgtggtagagggagacagttccatgaggccctaaatagtattccatattgcaaatcagaaagcataatttgtttatgtttgcattttagcatctacataatgactagcacatagtgggggcctgactaactgattgacaaaataaataaaaaggaatgaatacattgatgaagagatgagttaattctaggccaggctagttctagagataatttgaggtcatccttgccttcacgtgtatggctgactagttacagaaaaagagtccagaggatgtgaatttttctgcacccatccaattctgaaatgccacaattccagagttctaattatgcatgatgcaaacttcctgtaactccatcactaggtagagaatgccagggagagacattccctttcctaggcttcctatttggaatctctctcagctcacaagagcaaagtgtgttgagtcttgaaaagggcatggaatagaatgatcatctccgggataacctaagttggaattctctaacttcttctcagtgagagacagtgacaaatgtgacccctcctcctttcctcttgattggcatgtaagtttgcataatattttatagagatcacacaaccactccacttagcagacattatgggttgaattgtgtccctctacaaaaaattaatatgttgaagtcctaacccctagcaccccagaatgtgattttatttaaagatagggtattcatcgaggtaatcgaggtaaaatgcagccattagggtggccctaatccaataagactatgttcttataaaaagaagggaatttggagacagacacacagggagaatgccatttggacatgaagccagccatctagaagccaagaagagacgcctggaacagattctccctcacagccttcagaaggaaccaactgtgccagcaccctaattttggactaccagtatccagaactgtaagacaataagttcggttgtttaaggctttcagtttgtggtactttgtttggataatgctatgaagctaatatagttaaccaaaactatattacagttcttggttaatatagttaaccaaaaatagcctcagacatctttgtggtcagaagttgccatcaatacaatatggtacatttctgtctagagtctatgctatgatatgtggtttgtttcagctatctattgtattgtaacaaatcattataacacattgattgcttaaaacatctaaaatgacaatgatctattacttctcatgattctgtgatttggctggggcttagctgaatggttcttctgctcacactggcctaaatctcatgctgcttttactcaggagtttggttgggaacaagatgctcaagatgatgtctccttttccaagatctcttctcatgaggcctgccaaccttcgtctttctaggtaacccaagctccttatagggtagctagaacccaggaatgcaaaagcagaagtcaccaggcctctaggggcagaggcccactcctagaaggggtagacctggatctggcacagcatcacttctgctacattctattagtcaagcaagtcacaaggcccagcctagactcaaagagaagacaaacagccttcacctcttgttgggaggagaccatgattaatccaccacaaggatgctgtttgttcccctgacctcacctgtgctcccacccttcctaaagctgttttccccatgccatacaactgagtacatctacaggatctgtctgagatagaaagtctggcagtggcttgaggtgtcctgctctcaatctttggtatataattgactatggcttctggccccatgttactcttcaagtctcctttgctgtcaatcacacaagggaaccaatgtccaagttgaagctctccactcccctctgcaacattgacttaatcttttggacaaggcttctgtctaggtcccagatctcagctctctgtcatcacactgccaacactccatgtctccaccacaactgggggcttgctctgaccgtgcttggtggcagagtacaactgcccagagtacaaccatgcactgtgctggttctattgataattgcctagatttccaaatcttttctgtctatagtattcttcccattggaaatgatactatgtttctgataattttcaaaactatggttaagactgatgtgctctttggaccctgtgtctggtatgcttgattgtacctttggaataatcttaacagctggtcatttctccgactttgtcacatcctgatgtgggttttcatgccaagaatggactcacctatatctgcatcttctcccaactgcttttggagatctagaggtgcttggcctaaatcctatgtttagaggcaccttgatgacatcagctaggaatggccacttgtcacatctctcacgtgttgacctgtgctgctccttccatcctcagctccagccctcacctgctatgaacaggagcaagggacatgtggggtcatgcggggggttggggggaactacttcttctagcttaaactcttgcactttattaaccgtgaggttgattgtttcagttaggacacttttggctacagatggaaactctggtgaataggagcttaattaaagtatggatgtattggctcacatcacagagaagtagagatataggcagacttcagatgaagctagattcaaggttcccctgatgctaacaggactgggtttctctcctcttgccttagcctagtgtcatcctggatcctttcttgggctttttgtggggttcccaataacactgggcccaccattcatagggtaagacagctggcacagtgccattcttgcctcttcccaggggagagagttatcatctttctcagtcctgtccacacaagtcctggggctcatctgactggatgggtttctgccactggtttgctctgaatgtccaggttaaacaattaagatggttgtttggctcaaatctgggtcatatgaaaccccatgaagaccccatggaatgagaatggatggtaaatctctgaccaacgatcagggactgtggctggaaggaaggggaaagactgttgggaagcagggtagaatacatgtctaccatattgatagaaatagcatcttggatgacacattcccaaaatgcttaaaaggctggactaatgggcttgaatttgtaaaataaactaaaatatgtatgaagtgtttcacatgaatgcaaaaagtcatcctaatatgaaaaatactctagtcaactataagctcagtatgagccactaaattgatttgcctatcagcaacattaacaaaagctaatgtactctaattttctatctattagaattatttaatattggattcagtggccttaggagatagtttctaactgtgactagatatgataaaccaaaagccatataatcatgtatagggatgccatggtgggaacctggggctcatggactcattcattcattcacttattcattcaacatatatatactgaatgcctatggtgcaggctcagatctctcccagcagatactgagacgaaatgtagcatgcaaactattctttaagggtcatcaccaatggaaatggggaaggaagcaagattggacagatgcgatacaggtccagcaaagccttgaccctagggtgctctagaacttcagaggaaatagtgcccatcttattattgtgttagactgaaatggctggaccttgataccttgaatttgattagtcactggatgtgggccccctggggaaggaagactatggttccaggggaggcaactttctgcagctgagacagaccctaaaggagctgacagttggagacaagtccttccacgtccaccaaagcactgttccaggcattcagaatacagcaatcaacacaacagacacaaaattcaagcaagactgagcattctagtagaagaacagaatagaatttttaaatgcctgaatgaatgtgtatgagttagagataaatgccatgctggaaaattcatcatgataaggtgaaggtagaacacgatggaagaggaaatggtgggtagtggtatgatggttgtgctattttcatcagtgattcttaagtagaaatctacagaagtgagagaaataactctacatacatttggggataagatctccagacagagagcacagcaaataccaaggccttgaggaacacaaggacaccagcatagctgaggggagggagtatgcggagagtggcaggagatgagcttagaaggacagcaggcgagcaggtcatgccaggccatggcccaagttcatacttgaggttcatggtaaagacacactgtgaagtggcaatagaggtaacttcttagaggtactcccttcacttagctgctcatttatagaggagtgaactgaaccccatggaagttataggattagttcaaaattgcatagctaggtagaagccctagagaaattcagaaccgagacagacaatgcatgatgtatttattaggatgccattggctacatgaaagagaaactttggattcagacaggcttcaataaaaggaaacttaattatctcacgttactggaagaccagagatgggaaggccctgagcatacctctttgagtggcccaatgatgttctgtccatcttttcagctggcaccctcagtgtatcagtcagggtgggctaggatacgctgcaataataggcctcaattccagtggctttaaaaagcagatacatagagagatggatagatattaatagatagagatatagatagatatttatagatagaaatatttattttttttatatttatatctctatgtactatctatctatctattgatctatatttactcatgctacatgcccatcgtgggacactatttttattagctatcaggcattcctcactatagtcacctaagtactcacactgacaaaaaccactcccatatagaacatcgctgatcaccatgccagaagaaaatgaaaattctagagtgtcttgcagcagcaattagatgctctgtttcaaaaataacacacatcatttctgctcacaactcattgactgatactagtcactttcccctcctactcacaagtgggctaggaattgcaattctactacatgcctgggaggcagagatatttggtaagcagtgctaacaactataaaattgaggccggatgcggtggctcaagcctgtaatcccaacactttgggaggccaaggcgggtggatcacctgagatcaggagttcaagaccagcctagccaatatggtgaaacccagtctctactaaaaatgcaaaacttagccaggctcggtggctggtgtctgtaatcccagctactagggaggctgaggcaagagaatcgcctgaacctgggagacggaggttgcagtgagctgagatcacgccactgcattccagcctgagcaacagagtaagaccttgtctcaagaaaaaaaagaaaagaagatcaacttcaactcttagctggtgccccaaccccaaggtaacaacatccagagaaataacaccaaaaaaagaagaagaaagaagaaagaaggaaggagaaggagaaggagaagaaggagaagaagagaaggagaaggaggagaaggagaaggaggagaagaaagaagaagaaagaagaagaaagaagaagaaaagaagaagagaaaagaagaagaagaggaagaagaagaagaagaagaagaagaagaagaagaagaagaagaagaagaagaaggaattatcactatttttaagagcaagaaaatttccccagaaaccccctgcaaacttctctcacttagtattggctagaactggatcatatgtcccttcttaatccctgtgaaggggaaaaagatttattatgtctagctcaacccaatcagcatttgccttcatttgccttctacaaccagggactgggtcactctcccctgaacctcaggactgtctgaagttggtggaggtgttggaagagatgattcttctctggtactttttattgagtcaaatccacaaagaaagagcactttaatactgtcaacaattcaggcgctcaaactagaaggagaaaagagaaatgtatggtggtaaccaagcaaccttttctactacaaagggcaaaccaggagggctggaaatgtcaataagaaatacagtgtactgcagcaagagttgggatatataacccctaagatcttacacaaccctgagatgctattatttccatgagtgttgatgccaccacttatgagcacaggggttcaggatacatttataggtggtggtggtctgagaaaccaaatcagtttcccctacttaatgccgctgaacaaatcattagagtctgatgtgaggaggacacatttctcctatccatcattaaggggctctcagacatggaaaagcaaattctggaataatgaagggatggtgaaggctcatggaagagacaaagaagggaatagcttagaaattgcacagagtgtaaaggtaaatatataaggctgttgtcttcaaatatgttcttatgattcccaaatgtatatgcctgtcttatcttctcttctgagcttgcaattcttgtgcaggacagctccacttagttctctcaaaggaaccacaacacgactattgctaactctgtcctgaacctgctttttcagccatgcttatttccactgtgggcatcaactcccagtaatctactgcatcccttcatcattttttacctgtattatcaggacagcttccaaattgcttttcctgcgtccagtccagtgttccctactccatttgactcagagatccagcaaacatgtaaaactgacagtgtcttctcctgattaaaacccaccaacagttccccagcaattgtagaataaattcaagttctttgcaagggaggattcaataccctcctgctagccttatttggaagactccctcagggttcacgctaaactgcttgcatccctgctcacacaccttaaccacttcctgtctttctggttctgctaaggatgttccctctgctgggagcctccttcccctcttgcttgctgtattaactcgtaatccattcttcaagattctgctctacctcattgagaaagctacatttgacccccatctgtccccttgcaggcctaggctgggtgcctgtcttctgctctcagagcaccctgcccgcctttatcatgagacgtaaccttgccatgtggaaatcatttgtttatctgtctccctaatggtctacaaggtccccctccttgaggaaagggactctcttattcattctgctggcagggagtaggcactaaacaaatgtttgttggacagaatctttaagaagaaggtggcaactgagaagttaagggaacgggaggaagtgcagaggaagagggagggaatggagacagtagcaagtggggagctgcggggatagtctgtgcaccgccccccaccccaccccctagtcaatatcaggatctccctcttgtgtcttggagtctgagttcgagctctaatatatccattccacggttcccaaaagaggaactcttctgttcctggatagggatcccttgtttaggtcacacatgagtgggactgaacagaaagtctcagggaaaattctctaccgccctcgctctgacagcctgttccctgccttcagttccctgccttcaaccaaagcacgctggtcacgcaggcagaatcttggccttggccatcgctttttgttctcagttccccctacctcctccaaggacacacgccaaggatggtactatgattctcttttgggatggcctcgtagctgtgaaagttagactcaggcctcctttccacagacccagacacgcaactaccccggaaagcacccccgccctgcacccccatcctcctcacctcccataggagctgcagcacagagatttcaacacaggggttacaaagctgagtctcagaggttcagatagctttctaatggcctcgaggctccgcggggaaaaaaaaaagtatagcaaagagttgccatccagtcctggggctgtctagcgcctttatgcgtagtgggtacggggttggggaaagagtgaccaaggggaagagagtgtaggctcagctcacgggtcgcccaacagcctcagacaagccacttgacccctggactcagtttgggaacctgtagcaatgggtttgacctcttctcctggctgcgagtatcaccactagggagaggcaaaggcttgcagaaaccccaactcccgctcaggcagcgcgctgccccgggctccggtagggtggggactggtcgcgaaggctagagaaggcaatggcaggggaggtcagtccctgccgcgggccggctgcagagcggacgttccgccctgctcccggccccctcttcgcccgccgggttcgccgtgtcgaataactgctgtccggagctttcgtgacgcggagcttcaactgctgcgatccggaagaagcgaaaaggagtcccccccgccccgcaccctgagcgcccgggcgtgcaaacgtgggtggcggagagcggctgccctcccctcccctgtcccccctcccctcgcggcgctcccgtgtgtgcgggtgtgtgagtgcgtgtgtctccctcgctcactctcgcacacgttccggcactagtgcaggcggcgagccggcggctctccgctcgctcgctccggcagctgcgttcccgcctcgccccgccgccgccgccgccgccgccgccgccgcctctgcagtcgcagccgggcatggtgagtgagtgaggtccagccgccgcgcgctctcccggctcgccgccggaccccagcctcaaccggctccgtcccagggagccagcctgcggcgggagcgcgctgcggggccgggcggctgggggacccgggcggccgagctgcgcctggaggggcggcccgtgcgctctcggttccaggcgcgcagggccgcgggaccccgtcttgggagcgggctctacgcccctcccggctccgagtctctctcctcgagggctgcgcgcaccctccccgcccgcctgcccgcggttctcctcctgctcccggagcgccagtcgccccaccccgtgaccggctccccgtcttgtcccgcaggacccgcccggacgggaccacgccgccgccgccgccgccgccgcccggagccgcgcttcgggtcctgcctgagccgagccgcgcgcggggccgcagtcaccgccggcgggggatggggctgcccaggaggcgcgccgagcccgcagggggagcgcggagccggcgcgcagcctgagagcccgagcagcccgcgccgggccggtccgtgcgcaccgcgcgccgccgccgccactgccgcccgcgcctcgatggcgccatcgccccggagccgctgaccgctcagcgcctccagcccggcccgcgcggcgggtcctccgagcccggcccgccgggggagcggcctgccgcggaagcctccccgcgccctcccgcccggccccgccatggcgctgcggcgcctcctgctgctgctgctgctctcgctggagtccctggacctgctgcccagcgtccacggagcccgcggccgcgccgccaaccggaccctgagtgcaggcggcgctgccgtcgggggccggagggccgggggcgccctggcacggggcggccgcgagctgaacggcaccgcccgggcgcccggaatcccggaggcgggaagccggcgggggcagcccgcggcggctgtggcggcggcggccagcgcggccgtcacctacgagacgtgctggggctactacgacgtgagcggccagtacgacaaggagttcgagtgtaacaacagcgagagcggctacctgtactgctgcggtacctgctactaccgcttctgctgcaagaagcgccacgagaagctggaccagcgccagtgcaccaactaccagagcccggtgtgggtacagacgcccagcaccaaggtggtgtcgccggggcccgagaacaagtacgacccggagaaggacaagaccaacttcaccgtctacatcacctgcggggtgatcgccttcgtcatcgtggccggcgtcttcgccaaggtctcctacgacaaggcccaccgccctccacgggagatgaacatccacaggtgagagcgccgcgtgccgcgcgccccggtctccccgcggcctcaccctctcagcttgcttcccctgtcctcttcactctcggcatcatcacacctccccaggccctctagtcatttccaccatcgctccttttgcatgcaataaatcagggtcttcttgtgccccctcctccatttcttcagaaccgggaatgcatgctttggtggtagggggatttacaaggcagagtaagaattggttgagtgcatgaagttccaagtgtaagaatgttacaaattctgtaatcgtggatgaggatccagggttctgctttcctggcatgagggcactttggtgtaggttcttaatggcatttagttttttgagtcaaatcagagtgtcatcttcaatataggaaactgaccaatgttggaaccttactgaaagcggtaccaagtggcttagggtcaactgagatgttctcgtacattaggaattggggttttatagaaaggatgcctcctgccggaagtagggataaagatttctccattccatgttgaccaagcacagatggtgtctcctcattgcatcctgcggagtgggatgtttatctttcctgctgagactagaggactcgttctttgaaaccctgtaggcagaactctgagttaacagtactcgcctgtgttaaacctggtggggcatctttcactgcttacgttcgaaagacagtgggagctgcctcctaccaaaacttacgccaagagctcaaactatggcagtccctggttgcacgctgaatgctgccccgacgcaccatcttgccccccagtgagcccttggggaagtcaaagccaaggggatgacagaaacccagcctccccttagaactctaggaatgacacacccagaggatgcagagttagctcggcttcctgtcccctcatgttgatggatggctggacatggtgcaagagtcctctcagggaacaaaccctgccccgggagatgcctccatttctgttgcatggtgtgggcactgccctagtcaccatgagcaccccccagaccactgcttgtcagtcagtcctgcaggcccccacactgacccattcaccttgagctcttctctgcgtcctgcttgttattcttaccacctgaaaaccgccttcctcgctgctgtgcacattaatcacccctgccttgctgaagagagagaaaggcagatagaaatttctaggcatgttaaaagagctgattttttttttctgcttgatactgtgggtgttgagagaaatgatactccctggaaggttttattgagtcaaatccacaaagggtgggtacctcaaactcgcgtgctggaattggagtgattccaaaaggagacccttttataaggctctgtcaccctgaggtgcctccaccctgtcttccacttgcacctcatgtctcagatagtgcagtaagtatcctcttgtgtgagaaacagcctgtggtcagtcttggctctcaaatgcagaagacaagtgggacggtgagcaaaataaaggcaagagacagtttcttttgcatcttgtctggcaaagaattttctgtctcggctcagtgtggaaagaaaagaaggaattgcccgtgggcaggtgctgtcctgaagcagatgtgctggtccttatcatccttacacctctgcctcaagacttggaggcttgtctcctcttccccttcccctgtggccttggcctctcattaaaccttctgctctgaccacagccgcttgctcgttgattcctacacatctttctttaagttactttctttctgagccattgttctctgtactcagggaaaactgcctgctgccctgacccttccacctcacacagtttattcgtcatcgcctgggatgatacagagggcggtgtcctcaaatgctggcagcaggcatctttggatgctggcattggcacgtgaccctggagaggtcactgtccctcttggtgttttctccccttcccaccaccctgatgccccttacgccaaactagggtgaaggtgattacggcattggggcagcttctctctggggttggggaagcagagtaaccacgggaagggagatgaatttcaggcctcagagctttatgcaaatatgggatgtttccccctcaagttcaccacctgattttattcagttcacagcctctcttccagcagctgcagtcttgcctgatcagtgctttggaaaccatcatatccgtgcctgttgggtaggggacaatgcctgtctgtgtgtggtagggggacagggcatgggggatccatctacgacactccatgaatgaccttgggcaggtcagggaaacttatttttcagttctgggtaactgaagcacaatgtcccaactcagcttcttgcttccggggcacgtcagggtgagtgtgcaagttgatctcagactcctgggggtgagtgtgactacaccactcttctcactttgctcacacctcagagaccaccgtttgccattctggggagtatttttgtgtagactgtcttgttgggcaatcaaggtagggaaaaggagggagtgatagagacagagaaatattcacaccgtaatgagttttccttagggaaagtggggaggagaaagaatgtacactctcgagaggtcaagagaggaagcggatgtgcatgcagttacatattccttgaaatagctcagcaaagatgtttcctttctgaacaagaaagacaaaccggtttcagtgtgtgcttccccctgaagatgataggtgggcagacaggggctgagtctgagggagtttcagtgagaacagcctcattggagagggacatttatgggagtgtgagcaggggtgaagggaacggatgggccatctgcatctgccttagtgctcccaggctggacagccctccgcctgcccatgcacacacattccttagggtaggacttcctttcatctctctactccttcagggaggaagatatttcatcatttccagaagtgattagaccttgctatcgtgtttctgagtgagaaatcagtgtctgtgggggaaaccgtcagctctcttgtgattctaatagatgagtaccaagtccgactcagctagctggactccgtggaggaggaagagatgggcacaggattgaaaggcagagctgggtgctggatgtggccagagagccccagggcagccgtgcctgcctttcccaaccggaagcccaattcctaccaggatctccacttcacttttcccttcttccaaactgcccgggctaaggctcaagctgcagccatccacagattttgctatttcctgactgacttccgcacagctcccctgaggggctttttgttctgggagggccgccaagggcatgggctgcacccaggaaaccgcctgggagcctgggtcctttttgacattcatttttgtgctagctgtctcacatccaaacctgttccttcctcctcaccctgagttgattcattagtgtcttggagatgagaatcattctgagggaggaactgtgtggctttttttaatggctaattaacagatgggtcaggaagctattaggatgctggagacgcagttggtgaaatcagagctgccctgggtccttccactgcctgcacaggagcagaggggatcaaagaatgtgggcagggtggggggggtggatatctaggtgggtgggaagaaaaatccaggtggatatcaacaggaaaaagtattaggaggtgaccccttcatcttgggttggttctcttgcttatttctagaagaagtcaagggaatactttgttctactctttctccctccagaaattaattagaaactcaaagagctctgttatttcctcacaggccacataactgcagtggcagggccccttcgctggctgatttagtgagttctcttcctaggctcctgggcaacaaattgtcaagtcactgcgttttttgaagcactgtgagctcactataatgaattgatctaaatagagagtcgacttatttttctacttcaaatatagaaggaaagaaacaaaaaagcatcttgccttggactgaaagttttagccttgcctttatttcttttttctttgagttaaaaaaaaaatgcttcgccgggtgcggtggctcacgcctgtaatcccagcactttgggaggccagagtgggtggatcattaggtcaggagattgagaccatcctggctaacacggtgaaatcccgtctctacgaaaaacacaaaaagttagccgggtgtggtggcatgcgcctgtagtcccagctactcgggaggctgaggcaggagaatcccttgaacctgggaagcagaggttgtagtgagccaagatcgcaccactgcactccaacctgggggccagagcgagactcagtctcaaaaaataaaaagaaaaaataaatgcttgtagggaaagaggaaaattgtggaagaactggagaagtcttatggaggaagggctaggggaaggatgctgggaaggcagaaagaagcaaaaatagcgaaaggaggaaagcaatccagtgagaggttgattattcccactgaagggacaaagtgacgttgccctgccttcatgtgccacaggcttggtttgtcctgactcttgcagacacacgcagacattcacttaacaaatgagccctgctcaccttccctgggcaagatgtgtttcatactacaccatataagcttataagacacatgttgcctttgatatatgaggttagcagggttccttcttgctttagcagggcaaccatgcaaatacttttcaaattccctacactgtgcaattctccttggtcacattgctcactgtcttcatgtcccttcctgcccctccccaagctcagaaggccttcacacccatccctttctcccctcttaccctacccgaggtggggagcacattcatttctgggaatcgactgctaaggtaccaagtttacccactgttctaggctgccaagacacagctagagaaaaaagcctaattcattgtattcaactggttttaatgagagatcggattgaccgtgcagtggattcaaatcaattgtgcaggaaacagtggttaagacagctgagaaagtgatctgattgaaagaggctaattcactagctccagacggacagtcctacggatccggaataaaagggaaccacaacaaaagaagcttcatgcttccagttccatcgcctgattttccaggggctggcagattgtatttaggtcttccctttctagttcaatttctatagtctgcaagaattcctaccacatgctggaactgccaccgtgctcctggctatgggaggtcaccaccctccttccctgctgccctctccccattcaaacacctgtaccatccatttttgaaattatggtgaattttgtcttacaattttgctcatagcccttgatgatatatcacctctggaaccacaaaatgatggtttcaatttacaagcatgtaagatgtctcagattggttggtggtggtgggaggggttgtgcttgggtggaatatatgaggatttagactaagtacgttttgtagtttctgttgtgatttttcccctcttttctttaccttgggaaactccaccccattatttcttcctgagttacgtttatgacctcacctctttggcgtctttctttttttttttttttttgagatggagtcttgcttggtggcccaagctggagtgcagtggcacaatgtctgctcactgcaacttccgcctccctggtttgagctattctcctgcctcagcctcccaagtagctaggactacaggcgcccgccaccacacctggctaattttttgtatttttagtagagacagcgtttcaccatgttagccagaatggtctcgatctcctgacctcatgctctgcccacctctgcctcccaaagtgctgggattacaggtgtgagacacggagcctggcctctagtgtctttctttgcagatattgtagagagataagaggcctgggtacaagggttaccagtgaatcctcagagggtctcagtcccttgaactcaacccttgagcaagcttaattttaaaacaattcaggatacattgctaactctattttttttaatctctcgaagtgaaaccagaacttctgaaaaagcagggtagtacattctattcttttgtcatctattacagaattataacgttttcattgcaggcaattcatttaatctcgttacctagttttacaagtgaggcaactgaaattcagagaggctaggtcacagtgccaaggagcccagctagtgggtgggtgagcttggaggttaagccagggcgcctgtgttctagcgctcagactcatctcattcaatgaaaatatattctgcttctttactctttgcacgttccttggttagtcatcaccaaataactttgggatccttagagatgtgagttacagccttctcctttctctttctttcctacgtttctgtacccctcctggttcactgtttccactgaatgtctccactaaaatgatttctgtcgatcttccccgctccttttgcagttttttcacgttcctttcttaagggcaataacctaatctaagcataatccttttataaggtctgagtaatgcggactattgaagaaggaaaataacagcacaaccaaagagttgtggactggggcaaaaagtcaccgaatgaaactgtgggcagaaatctgtcattaaaaattcagggccaggcacagtggctcacgcctgtaatcccagcactttgggaggccgaggcgggcagatcacgaggtcaggagatcgagaccatcccggctaacacggtgaaacctcgtctctactaaaaatacaaaaaattagccgggcttggtggcggcgcctgtagtcccagctacttgggagactgaggcaggagaatggcgtgaacctgggaggtggagcttgcagtgagccgagatcgcgccactgcactccagcctgggcaacagagcgagactccgtctcaaaaaaaaaaaaaaaaaaaaaattcagactgtgaatgctttctctctctctcccagagatgagtggaaatgctgaatgctgagacctaccggatcaatgcagttcagctctgtgagaggccagagacctcccgccatccagtggccgtgtgtgtgtgtgtgcgcgtgcgtgtgtgtggacgtgtgtgtgcgtgtgtatatgtgtgtgtgatttcagggttatcttctgggttggccccctgcatagaatatagctctgcaagccacggaagctcattcatagacgccagttttgccctttctcagctctgggcccagatactgcaggctaatcaagctggaaatctgggcttaatcattatgtgaaaataacctctgtggcatgcagtttgggggttttccctgtaatgtgcttgatacttcctttgaaagaacctggttgtacataccttaatgtgtcacccttccaagcagtcaccttgggaggccgcatgctgatttttctgcagaaaatgtttccacggtccctctcttgaaagtacattgagagcccatggcatgtcattttgactttatataagggtaacatattttaattttcctagggttgatttgattcttgtaagcaatggtaagtcatggggctgagtctgatgaatgagataggtgatcagaaatcaagagtgcctccagtaatgagacttgctctcctaggagccgtgtcagctgtctctgaaggcaggagcccagaagaggcatttcagaaaggagtgaatggcagctctgcacaggagtgcctggcaatccacgatgatcattttgaagaggacactcctcatgaggaacgacaattattggccttaagaaaatcagttttatgctttatccgtgtgtcaggcaggtggtggaggtcctaagagagagggagaaaaaggagttgagtctgcagcaagcatttcacatggaactgctcagaaagggtgaaaaagtgcacgtcccatatttctgcatgagatagtagacagttagcttaatttagcttcctagtttgatactgagggtaaaaggacccagttttacgggatgtatgcagtgaggctcggggtcagagccagagtgttcactgtgccttcccttctttctatcccagggctgtcgcctctgtacttctgcattcagacggggtcaccagctgggccagactgccttagatgatgtagaaatatttgcaagcccaggaagataaggctgccagtgagcactgctgatcaattcctaatgtgcatttatcaccactcgctccacccccaaatgtccattcagtggatgaattgatcaccgaaatggagcgagggtggggcaggctgagtgtaaaggcaggtgacaagggttaccagactcagtgtctgcaggcagggaagccatggctgtgctacctgggtagaatggcattccttcatctcagtcaggatttaggggttggtaaagggctgggcatttgtactgcccccatgcataggccggggcagagcctctggtcctgatgaccctctaaaggccattgttgggcattctggaggagtcagtcttgctgtgagcctggggagtccctcttaactctgctcacgtgtcaggacagtgggagctctgtgtcccaggagcttacacaaccccatcactcatgcaagcccacaagccagagttggagagaactggagatctcggtgagatgaagactcaaggaagtggagaggatggtagagagatactcataagagtgccgggtctcgagggcttactctgtaccagcatccagcttgcacctaacctgcattatctcgctgcatcctcccatcatcccgtctgagtgtaggggcccatgttgtagatgaggaaaccgattcagagaggcttagtaacttgcccaaggtcacacagctagtacattgctggtgcccttctctctctcaagtccagtagaacagttgggtctcaccttcctgaatgtaatggagtcagtgatactcagattacttaagaaagcaaagacctaccttcccatgccctgggactggttatcatagtgaaagactgggaagataagtgacctacctatgagggctctgtggaaccagaacggcggcccccatttagattgcatgcaggcagcaagatcctcagggcagtgaaagagctctctttcaggaatatatgatattggctgaggatagcaaaggcaatgcaaagaaaatattaaacaaaacaaaacaccctgattttaattgagaaaaaaaaaaaacttgacaatattgaaagaacccctgggcaattctgcatgagtcagtggagagcagtgacgggagcttgggtgaggggcacaggagagaaaagaggcgatttgggaggcggtatggacctagggatatttctagttttaattactgagatgtagagctcacaaacagctccatttatcacaactctcccaccctgccccatgtctaacatctagcatcgtgcatgcaagacacagcactttagccagcttgcttctgctgttccctgttctggttttattccttccctgtttgtaccctggtggctgtgcttcgtaatgactcacgctttccctgtgattctctgtttccggttctctcaagtcccctgtcctgaggggcacgtggaaaggaaggaatcctgggacactcttaatagcctgtgttttactctccagctcccaacctgccacacgcctcaaggtccggttgtcacagggcggtgagcagcagctgaactcacattccctggtgtgcagctcttgccaggggcacctgagcaggaaactcacctctgcctgagggtgtgtgaaaatgtatctcactagtcttccgcaggaacccagcgttcccgctccctgttttcatccttcttgtccctgcttgactcatgcctactccttgttagaagagcaagagaacacttggacccctccttgccgaaagcccctgtccctctctccagacccacggacgcaggagccccagtgagacctctgggcggctagaaccttggccccattccccagtgtttgggagaagagtcgctgctttctgcagtcttcgcaaacactctcattattccttgcttttttggcatttggtctcgtgtactgttcccattagcttcggcattaaagtctcattactcaggacatctgtcctctggacatattcgttgttcccttagccaaatgtcctcttctgggaagcgtgttttccacccaaacagccacttctctcttccttcgcccttgctgtttcagtgggaggaatatgaattctgaaaggcttggcggagggagggggtggctgttaatttgaagtggcatctgagagtcccttcaagagcccatccatccactcctttctaaggtcctgagaatatggatctttgctaggagtcaggcaggttggtggccaaacaccataggagcaaagaagggagtcgccaggggagttttccccactcagtcctaggatcaggctcagatacaatcactagggaattctgaccttagtcactgctgttggacggctttgactgaaggtgagactcctcttaatccatctccctgcagcgacagggcatgtggctggctcaaaagctgaggctgctccagaacttggggaagaatctggattccaccttccctgttggactcatagttagctgtttctgactttttgctgcatcttgagaaacttgcctgaagtttcccaggaatggtgtcccatagtcttgggagactatttatgcaatgggaaatatcaatgcgtttcagtgctcagataatcaacagccagcttcttacccagcctcaagcattcgcgaagaagaatatatcgggcttttgagccgaggatctcttacacctctcccttgcttttaagtcacatcattaaaatgtttcttcgtgtcactttcggtgttctgtccactgctgtgtcttctccatctgtccttgttttgattcctgttcagttctgtcgagctgtgttccttctcccctctctgtccgacttgccttcctgaacttgtcctgccacaacttcattaagccgcatcgatttagatgccactaattcaaaatttatccaaattggacctgggcaaagtttttttttttttttctttgtctgataaaaatctgtgatgaacagattaatagctcaaacaagactgcagagatttcacaggggacatacaccatggagaaggttagattgtttacaggcgggctcttagtagacagttggcatgttaattccaaatcattcttatctattcattgaagtagctcttcgaagatcaattttattttatttttttagttgagtttgaaatcctgcattggcccgggaagcagtaaaaatgcatttcctttaaagtgttttggaatttttatgtctgtttcgttgatagggattagcctgcccttatttctactgaattggtgatgcttgactggaagctgcttcaaatctcctttgcaattccctctgggggttcctgctaattttccctcttcttgtttcttttctttttctatttccttgagtttttagaatccaactctctctctttcggctttgagaattcatgttataaacttcgccacatccttgtgctcgcttttctgcttcttgccacagtcataaccagctgggcctgagaggttatggatctggaggcagactttggaaaacttgtccggacttcgagccctgccttggctctctctgtggttctctctcagtggcctaaggactcttgcttgtgaatcaccattcccaacaccactgtttggattgaggagacagcatcacacctactgtaggaagtggtaggaggcccttagccagcagccctgctccttatagaaaagaactttgacttgcttctcttagtctgcttatgtggctctcaagggacatctagcaaagccttctttcacctttggaggttgtcatccatctttccctgccttagagcatttcctgggagctgagctacaagacagagtaatcccaactctgtcactttctgtcttgatgaccttgggtgagtcccttggcccctctgctgtgggatgtgagctgtagtgttgtggaagtgtgttcttctttggcccattctgccctcagcacacctgaaagatacatgctgacacagtccacatctatacttacaggttcaacagctctgggatgtgggaggagatgtattttccttgcatacgccactcagataagaatgttgtctgcaagtggccttgtgaggatgctgcttttagcatcttcgactcataggatctcttggtagaagaggacttatgaggcattttagtgactctctcttttggcaccacctgcccctcctctcatgcacagcaagtggccatccatgcgtctagggcagggctgcccctacctctggaggcagttggtctattgttaggatgcaattctagttgattctcatggggagccaaaattacttctttggcctgagatccacttcctggagtaactcagaaggagtgtatcctttcttttgcaggatggcaaaacatctgtttgaagatggcattcaaggcccacattcagtcttcccttctccctaataaataggcactcctagttaagagtctgtcctcatgggacgtgggttcaacttcacactggggcagaggctgtccacccagaaatggggttataattctatggtaaaaccccaaaggagatttctaagagcaacatgtggatctcagtaattcagatgcaacttaaagatctggtttcttctgggaagttctttggtctgcagccctacacagcagctttgctttgtggcagggatccatctcccataccactatgtcaacaggacaggagtgtttgcctgttttgtttacacctgtattctagtgcccagagtagtgcctggcacagagtaggtgcttaagaaatataactgaatgacaggctgaatacatgagttaaagtcagtagaaattaaagtggtcttttttgtgtaccctgcccttctgatatttgcattagtgtgaagatccttgagtagggaaatgacaataatgtttctaattgttttaaagaaggaagagaaaaatgaagggaggagggaggaaagaaggaaagaaaaggaagaaagaaaaagagagggagggagaaagaataaataactgaatcttttacagaacgtgttgccctggccagtttgatctgtttgcccttctgtgccccatttgactcctgatttcttttgctcaagctgtgaataccttcatttgcagcggggcttcatctggatacttctttgcaggctagtggaagcaaatccatggtgacctgacgggaaggaacaggctctctttgcctttggctgtcaaagtccaagttcagggttcagcagaaacgggtgtgtggtcatatggatttccatccttaagccggagtgggaaatatggggcgtggatggtcccttccaggatgacccacggccacagctgtgctgtgtggctcccccaccacaccaagagtgttgccagtttggcataactgcaccagtcctctaagactctcctcttctgcctatgcttttgttgtggtcctataggctgagccgatgtagatattaggaggttgtagacatttggatttatttattagtcaaatatttatgtaagtgcttaataggtgccaggctccttgtaagcctcgtaagcactttacaactattacatcatttaatccttatgataaccctaagaggcagacattattttttgcctcattattttggtcttattttttcaacaaggtcacagagctacgggacacttaagtagcttgctaacaaccgccaagtggccagcattccaacttaggctttctggcttgagaatctcagtgtgtggccattaggctgtgctgcctacgtgttgcctcacttccaggtttaggtctgagcccattgcaaataaagaaaataacaccggccgggcacggtggctcacacctgtagtctcagcgctgtgggaggccaaggttgggtggatcacctgaggtcaggagttcgagaccagcctggccaacatggtgaaaccccatctctactaaacatacaaaaagtagctgggcgtggtgacaggggcctttaatcccagctactcgggaagctgaggcaggagaatcacttgaaccaaggaggcggaggttgcagtgaactgagatcacaccgctgcactccagtctgggtaacagagcgagactctatctcaaaaaacaaaacaaaacaacaacgccaacaatcacaagaatcgtaatggcagcagcagcccatttgcaccttgtacacaggtacagttatgaactcatctgtcccctggttgaccatatggccctgctaccaaatcttggtagcattttttggtttcccagcttccaataataataggtgcacctgacacatccacgttttcaacgaattctcagacaatccaagtatttctgaaaagtctgggtttgatattgacgctaccacatttctcaggcctgggggaattttcatatgattaatgtaaggaacggagtatgtgaagatgatgctgttaggattgaattgggcccccaggggatgcacatctactctctacctggctcccggctggcctagtgacagcgccaggacaggcacccactgggatggagaaactcgctcggcttgcctgaaaaacaaaacaggcaggccgtgccttccctcactgagtcctgcgacgtttattggccatgatgaatttcaattgtgctggggacaactcagacctgcagaacagctcaatgcagatgcacagacattgttaacacaacaaatgagatctccacagccgttctgagcctctctgtatgaggagagcagtcttgtgcacacacaaagccagcagctgtgtttttcaagtggactccgagagaaccggtaatagggaaaactaaattaagccgttctccttggtccatgtttgttaaaaatacattcatttcaattgtcctggctacatattttagacaatggaagcactccgactgtccagtaggtaagtgtgagatgaggttaaagaggacaccaacagttcttaagaggtcattatcaagtaaaagcacaggggcggatgtagtggcttaaacctatcattccagcactttgggaggctgagggaggcagattgcctgagtttcggagtccgagaccagcctgagcaacatggtgaaactctgtctctacaaaaaattaaaaaattagctgggtgtggtggtgcttgcctatagtatcagctactggggaggctgaggtgggaggatcgcttgagcccaggaagccgaggctgcagcgagccgtgatctcaccactgcactgcagcctgggcgaccgtgtgagatcctgtctcaaaaaaaaaaaagaaaaaaagaaaagaaaagaaaggaaagaaggaaggcaggaagggaagaaagaggaaaagctcagttatctgggactcaaataacccatatcctttatttaactggaataaagtatctacattctgctttcaagagaaatacaaaagaattagctatcagagacttacctaaaggaaacaaaaacaagcaatttccaccatctgtcttgtagtttttatatgaacagttccatttcctagactgtctacatattacttaggttttcatctgtgaagagaactaaagattagactgatggccctcttgtgaagaaccttgaattttataaaaaaattaattatattcagtatacttaattaggcaggaatgcttttagaaagttcttcaaaaacaagagtgttctcattagtccttagaaataagaacattaaccagaatagcttattcacggaatagttcatctatttggccttttatcatacttatccaacagcatcattttcttcctaccatcccgaaaagagaaagggcatgattagggctcgaaactatccagtttgccttgcatttggcacagaataacttactgaataatagctgagcttgttttctcctttccacagcatttagacagctcagaaatccagagacgtggcagaggccgaaggtttgtttccattgcaccacttcagtgagcagcagtattcatggggtcctcatggagggcatgttgattgagatttaaaagaattaccaggtgaactaaggggctctaggttcccccacttaatttggggggaactaagtttgaccatctgttcagcgaatgaagattgggacaaaaaataatccaagttttcattttggtgctctttcaccatatttattttaaaatttgaaaactccatgaagtccagggacagctgggtagatcctgccagactactgggaaatgcttggaggaacagggccctcacttcccactggccttatgcacagcaggggtctggtgaagtatattggtgttctagtcaggatttcatttggcaaaaaagatggctgctaaaatagtgtaaaaggttgtagagctgttgatgtgaatgacacactaaggtgaatagcactgagcagttcagccacagctgagttcttaggtctgggtaggtctttgccccaacgattaaacactctctaaaatcttgtgttcagggaccattacagggacatagtaggtgaagaagacaaatgtgactaagtggatggatggatggagtgttgggtggagggatgaatggaggaatggatgaatggatggagagttggatggaaggatgaagtcttcaatgatggatggagtgttttatggattgatggatagagtgttggatggatggatgaggggatgaattgggggagatggatataattttggatagataggaggtgactggatggttgggatatgggatggaaagagggagggaaggatgaatggagggagggagagatgggtggctagatggatggataatccagtggtatatagtcagcccctgtagtttaacctacctatgtttggaatgtgaattcagcacttactagctgtgtgaccttgggtaacatacataacctctaaaagttttcattttcttaacaacgaaatagggctaccgatggcacatcccttgtaagagcattctgagaaatatatgatccaatgcatgtaagagccagtgtctgggacatagtaatcactcaataaatgatagtctttaatatctcgagcagacaagactgtgaggcaaagttatgaacaaggttttgtttatttttctgttgttaagggaaatcacttgccattttaagcactagttcatatcctgaatgcaggtggtaacacgttaaaatgttgactgggcttggtccctgcaggtgttgagataactaagcacttacggaaattcagatacactttcattccctcaggaccactgacaacaataaccaaggttttaagcaaatacataattggtattgaactgaatcactcatttactaattgtttctccatgcccaaatattaactggcatttgctaaattagctgacccagctggagggaccaggaagactcattaaagctgatgatttgtaggaagtgaaatgtatgtaagaggcagtcccagtgaacagaaggatgcccgggctcaagtcagaagccttgaagttaaatccctgttccaatatgtgttagtactggaattagcctgaacctcagttccttgttaaaaattgtggtaataatagctgcaaaggtcacagggataggatgggaatcacatgagacagggcaggtgaatgcatcgagaaattattaagtgctatccaaatgtaagatgatacttttgctattaaggtgattaatacacaataccaagtactgaagaaagcttaagtttcctggcctgatcacaatgactgttttccctgatcagatttgctgcctgattaatttactctcccctgctcaccacacacccgagaaagccaagaaatagacagaagggagcatcaaacctaggcaataatccagataattcaggcaaaagaattcttttgtttgatatatcagatattgcagcaaaaagggctcgctgtgggtgggggatggttggaaggagcatactactaaggtgactcttcacttcagattcctaaatcagacacatctgtcgtccacatggggggtgacagggccctgctgacagcctgtcgtgtcccgagtccctcacttggccgtctctgtgtctctctccgtctgactcttcccctccgaatgtctctctctgaccccctttccctgtctcttctgaatcgcattttatctctggatttccctttggttctctgtggcttactctccctcttgctcttcctacctgcttgcctgtccctcagactctgcctcctctcctctctctgtctcctggtgcctgtcactttcactaactctcttctctgaaccttccctgctctctcttgcttggggtttcagaccccctctcactctccttctgtctccttggctccatctcccatttctctcctctctccacctgttttctctcctctctttctctctggacctctgcccccagccctccctttctctccctctctgtttgctactgtctcactctccctgttgttctctcagatgctggaagctgctgcccactcttttgcaaaatctgctgtgctgttcctcagtgaccaattttctttcctacggttagaaagtagctcaggccttaacccatttcctccggcatattcaagttaattaggtgagaccagaatcgcacatttcagaactagaataatatttattgagcaccctggagagaaggggatggaagatggagaggaaccagagcaaggaggggggtcaccaatggagggagggggagggggagtaggcagagggactcactcttaaggccacgtggtctgggaatgagggcttccttcctagttgccagagggtactgggaaaggaaggatcctggagaatggtcacacatgggtgtgggaccaggagcatttccatagctgccatgcactttacaacatgtggcagggttcccatccttaggtagcctgtcaggcagcccttgtttgagaaacaccttttgctgtacacccctctctcttggctgtgctgaccagctcagtgcagcccactgggcatcaggagccctctcccagaagatacatcgcatagcgcaagctgctttcttcttttctcacatgacctagagacagcccctggtaaccacagttctgctttctgtctttacggatttacctaactgggtatgttacagaagcatggtcttttatggtgtgcttctttcacttagcatgatgttttcaaggtccatccatgtgatagcaggtatcagtatgccttttttaaatgactgaataatattccattgtgtgaatagaccacattttgtttttcctttcagcagttgatggacttttgggttgtatctaccctttggctgttattaatactgctgctatgaacctttgtacacaagtttaatgcaacatatatttttcattgttcttgggaatacctaggagtagatttgctgggccatatgttaattctgcgtttaaggaacattgcagttttgaggagctgctaaactgtttaccaaagggattgcagggttttccatttccaccagtagtgtatgaaggctccaatttctctacctccttgccaatacttggtattatgtggctttttggttatagctatcctagtgtgtatgaaaaggtatctcagtgtgatttacagttttgggactaatatctaggtatataatccattttgagttagttttttatatggtgtgaggtaaggatccaactcccttctttttcatgtggcgatccagtcagttgtcccaggaccattttgtgaagaaactattctttcccccacaatttactcagatgcatttttaaactgctgcagttgtcacttttcatgggggcagagtgttggagctggactcctggtaagagggaagccttggggtgggcagggccccacccatcagagacacccctcgagaagatggaatagtctttgcctggcatgtgcaaaacgggagtgcattgaggactggggacctggatctgaagtgacagtatccaggtgtagtttcttgtggctgtccacactcatctgtttcccactgccagtgggtatctcacatgtcacacccacagagggcatcctgtttgaaagcaaataggagagcgattccccctaaattatgaacccctagatggcaggaattgggtcccattgatctgtgtctcttcaatgactgatgcatgctgaatcgtcagtcaatgcatgtttggttgttgaagctaggcgctgagttaacaaaagctgctttctctgagtaactggacctcttgcaggggggcgggtctctcctgctatggcagagtctctgcctgtctctctttcttcctgtgtatttttcccctgtgtttgtgattgctccctcctctaaactccagttgtcttcaatgtctgcaccatccacgtgttttgatttttatcttttcatctctatgtcctgtctttgcagctcaatcacacccttccttgatagcaggagctgtgtgttgtacttatttgggtctccagtatctagtacatgatactcagtgtgtagttttggatgatgaagtggtcccctgatattagtgacctgctgctgaatttgaggccgatggtttcagcccttcaccatagtggcattccactggccagctgctatagatacctgcctggcataggtggatatttggggagccagtattttgaaagggctcagagtttactgatgtgaaataaattaaagaaagaaaccgtagtcccagccttttagtctgtacctccaggcatggtaacctttaccctgtgtcccccctgagaccaacaccagatgtagctgactattgagagctgaatgctgtctctgtctcttcctgcatctctgtaaatcaaagggcatatgaaagtaagccaactcccctcatggttgtgcacacctgctcagtgaatctcattatgtgatctcctccttgtttagggctctggctgacatcttaagacaacagggaccaatccccatagcacactgtgaaagagaaactatctcggctatcgatacctctcccaaagagaacacgccggtcagatcgtcctccaaaaaccactacactcctgtgcgtacggccaagcagactccaggtaagtaacagctgggcaccttgattctttgctgaggctggtgagaggtttcaggatgtttctgctctggtggggcaggttgtggaccatgatggtgtgatgagggactctcatggacaggcaggctggcaaaagatttttgggactctctccctggggtgagtttggaatgggcaagactgctgccggtcagtgtctgggctggatgaggactgacaatttcaggcacttgtgacctagtgagtggttggtataattctcttaccggaaaaggagcttgcagcatccatagcagggtatggccatccattcgcccacgtggtgggaaactttaggctgagtaggatgctagatatgtgacaagaaattactgtaccccaatgtagagcctgctcaactattgggatctcaaagagctccttcctgagggtgagaattaacatctgtatttttgagtgaccttttcctgtgctctgtagattccctggatgtatgatgagttgccataaaataacaatatgccttttactttttgtacttatcatagctataactgtgaagaaaatggcagggcttattttccttgtcttacgggtcaatatatgcagctcaaagaaatttagtaacttgaacaaggtcactgagatgttaataataatttaaaaatcagtaataacagtaatataacctaaatatttattggaatcttgttctgtgccaagagtcatgctgagccttttacatatattttcttatttattctccacagcaatcttagaagtacttatattatccccattttgtgtgaggaatggaaaggttaagtaactttcccaaggtcacatgattagtaagagagaaaaacaagattcaagccaaggcaaatagttaacaacagtaagaactaggaaaccgtaatatccttacccagttaagggtatgaatccaaaatatctgagtggacagtctccttaacaagtacagcttgggaagtcatctcttgtagtgagtgtttccagatagcctcttactggtactaatcctagtcccagagaaagcttttactttgatgcttggatctgaaatctgcacatctattgctcaacagttttcagaggatgggcaatgtgatctgaactaaacctgcaataaggatatatagccactaggtggcagtgggtgtgatcaaatccaaactatagcaaaggtgctgatgagaccaaatttattttccattcattctttaattttcttaaatttattacgtcagaaacctaatatttgcttttaaaatagcattcttaaatcttttgagaacctaataaaggcagatgacactccctcctgaaaaatacaaatacatatacatattcatattcaatcaacagtttgtatatgattgaggggaattaatagattcatccaaagttaaaaacctctgctgtaaaggtaaagatgagggctccacctttgcaaaatgtctaagatgcattttcagctttaataccataggtccttaaaacaagcaatagaaggaatcttggcaaaaacttctggaccagtggtcatctacatggcagcgttttagaatcacctgaggaggtcttaaaattgctgatgcctgggctccacagaatcactagaatttctagggatggtgctggcatcacattagtgttttaaacaatctccccaaggtgattctaacatgcgtctagtggtcagaatcactggttctgaaggattcattcattttatgagtgaagacactgaaaacctaagcccaatggttcttaaacttggctgcacattggaatcaactggggatctttaaaaattaaggatgtctgggccccatccccagagactgactgaattgatgtggaagtgtggcctgagaatggaggtgggtgggggctggtggctaacacttcccaggtgattctaatgtggagctaagtttgagagtcactgggctgtgggagttgcatagaggcaccattgtaactaatcctttttgtcattgatcactgttgaacccaactctggtattatcaccacctttgagtagtgtattttgatttttccaaggattcatcctttgaagtcattctccaccagaaccttgttgtgactctgaaacttcaggtcactctggcatcaaaagcacccctggttgtttatcttcccctctctctgttcgggttttctttgtctcattctcaagcgagctggttccccactgctgaacacagactgattaggtggacagtctggatttgcccttaaatacccttcacagggcaggaagatttgtcatttcttctggtttctgtatacctcgtctcttctagtgagctgagaaggaaagcttccagttacatgattcacttctatgtttcaagaaattctcctcaaatttctcaaattggaactcttcactttgcgcttagagatgggaatagtatcctggcccagaaagcattctcagttgtgatgcttaaatttaaaagcaatttcatcacaagccgcagcttctacagattataatggacacaatgcttttccaagcagttgatatcctttgccacaaaatattgcagtttgagcagaagttgaacagaactttgcatgagtgttcaaagtggaaatttactgtaattttgccactcatcaaatcaacaaaccatcaattgtaggagtatggtagtaagtttttagggggctattaagggagatatccagcaacaccaacaggcatcagagcatatgagtagctttgctactcaagatggtgttggtgggtcagccacatcagcatcacctgagagcttgtgggaaatgcagaatcccagactctacctctcctgctgaatgagaacctgtaatttggtgaaatcacttggcaattagagtttgagaagcactgggaaagcttgagcattgaagtatgttcctcagtttgctttttggccctgtctcttactatgtatgtgatcttgggcaagattctttgtctttccaagtttctttgtctgctattgaagccaatcatacctgtaggtcagagttgttttaatggtataatcagttaaaccaagtaaagcacttaagacaggtccccatacatagcaaacactgactgttagccatgaccaggctatgaaggcacatccacagctcatggaaaatgaatcaaatgaatgaaagaaccaaaggcaatgcattggtgtccttagaccaggcagggcccatgggattgtgtgtgggatgaaggtccctggactcaagccttcctgtggttggctcctgtctgaggcacatcctctggggatgaaaggaatttgtggagcttggtcagggttttggacattgaaagcacatgctttgttggtttgggatgtgggttgagagtcctgcagtaataatgaaaacaataataacacaagtaccatagattgagaacttactatgtattgggtactctgctaggcactttatgcgtaatagcgaatggatcctgtaatatttcttagatgtgaaagtttctaatcccacattagcagaaaaatcctgtccccttctataagagccttttaccccaactcttccaggaagcagctttccaactttaaagattgccccataaggaacacttggtttgaatgtagaaaaccagtgaaccctgctttaatcccttacccctcaaatctggctgcctgcagacccttgctacccaaagtgtggtccatggaccaggagcaactgcattccattggaacttgttagaaatgcagaatcttgggctcttcctcaaacctactgaatctgaagctgcattttaacaagatcctcagaggatttgtacacatgatgaagttgaagaagacctctcttagctcagtgattatcagcccttgtcacacattggagttgtgtggggaattctgaaaataccaatgcctgcccccatcccaaagattctaatttacttggtctatagtaggacctggcattgatattaaaaaagaaacaaacaaaaacaaacttccacgtggttctcctgtccagaaaactttgagaactgagctcttaaagttttgagggaactggaggaaagctgtcaaataaggaaaagattctttgaagattttgaatgtaggttcacatcaagatctgcaagatgcagactggctaggcagagtgagtgtggctgtcgtaaccagtcctctccttaatgggtggggctgaagggagtggaagactcaggcttatctgagagagggaggaggtcagtatggagctttgaaaggagacccctgggcaaaagcgggcacaagtagaaataaaaagattgtttaggggaccaagcgaagtcatgaagagatgcaccgtacctagcgttgcagttccctgagtccagcaccttagaggcttgctgtgggcttgcttttcgtagatggggagcaggagagacccagcatgtttgcctgacctcaccccctcctaaagagcctgtcctggggcctctggggagagtggggtgcccattcctggcagtagcaatgagatcatgtgctgaggttacagaatgttgatgtccaacttcactttatcaagagtgacatcatctggagacaataaatattcatgcccatctacataccactgtgagttgtataaaagaacagccagtcatcctgcctgttgtcaaagccatatccattaatggcagacaaagggagccaagggtcatgactctctaagcttcatggagacccagaatggaggctgcacaggtggcagaggagcactctgccacagtcctgcatgccctggttcccatccccccacgcctctctgacctcaacccctactaccttctgcttccctcctaggctgcagacacactagtcttctccagacacactgtttcttctcatgctgtttgtattcttgcattgagatatttccccctttctgtttctgtagccccaaattttctagcactaggtatttgttttgtggaatctgttgctcaagcagcactgttttggagaggcctttcctaaccttctctgttaccatctccggctttacttttctcagagcacttacatcatctaacatcatacatttgtcggttcatgtgtttattatctgtcaccatcagaatttaagccccaggtacacaagggttttatcttcctatcattgtggtatcctaggaccaagaacatcacttggaaaatcctagttgctcaagagctgtttgttcagggaatgatgaaagatgacatagtcctttacttggatgggcgtaggatccaagcacagatgctggttatgcagctgctgcatgctgaagaactcccttcaagactgcatcccatgtagtagccctctctgtaaagtaagtatggtgtccgtcacttgcataaaccataggctggtcaccagccagctggttgagccagaaggtcctggtatccggtgcccagttttttttgtttgtctgttttgttttttttttttaatggagtcttgccctgtcgcccaggctggagtgcagtggcgcgatctcagcccattgcaacctccacctcctgggttcaagtgattctcctgcctcagcctcccaagtagctgggactacaggagcccgccaccagatccagttaatctttgcatttttagtagagacgaagtttcaccatgttggccaggatggtcttgatctcttgacctcgtgacccacccaccgtggcctcccaaagtgctgggattacaggcgtgaaccactgtgcttggcctgcccaggcttcttactgagccctgtggcccctctcctcctatctggggctgacccagaactccatgggtcagcgcagccagggactgggagcttcgcttccatggctgggctcagagggactgttacccagggtgcccttccagttctttccaccctgctaagaaagcacgggtggcttggaagcccaggcaacccagagagtccctgttcccagggacaggtttagggctgcccatgaagccagaaaacctgggctgtgcagctgaactgggaaacttctggtgagtctcagcttctcacaggaagtaggacttttcttttctcagtcatccccaaagaaacagaactgttgttctggaggagtctgagatgatagcctcataaggttttggagccctatggagatggtgagattagctggccagaattatgcttggcctgtgaggaaactgaggcacacaggggtcacttaagtgggaggtgacatcaatgtaggtataaagcaatcgaagcgcatctgacacaaaagcgagacaattttaagtcttcactctccaatatattggttcctagccacatgcgactgttgagcactaattgttaaaattaattttacctatttatttttattttgtaagtttttatgtttttagagacagagtcttgctctgtcatccaggctggagtgcagtggtgcaatctcagctcactgcaacctccacctcccgggttcaagagattctcctgcctcagtctcctgagtagctgggattacaggtgtgcatcaccacccccagctaatttttgtatttttaatagagacagggtttcaccatgttggtcaggctagtctcaaactcctgagctcgtgagctgctcgccttcgcctcccaaagtgctgggattacaggcgtgagccgccgtgctcggtgaggagtgtatttaagtgtgatgatctgatttctgttttctgattgccaagtagtggacagcacaggttaatgagagaactttctatgactttccctgacttctctttccacaggaagacaccctcctatagaggggccaaggtgatgtagaaagagcttgtaggtttcacagtaagacaaaccaaagaccaaattgccccttggtttggacagcctggaccttagtccagggctcttaaataggagttggcaaacgttttccagaaagggccagatcgtcaatattttaggctctgcaggccataagatctctgtggcaactacccagttctgcccttgaagcacaagagcagccatagatgataagtaaatgaatggatgcgtgttttcataaaatttggacatatgtttccataaaatgtcatttacagtagcaggtaacgggcagggtttggcctgtgggctctagtttgtcagcccctctctgaaagtcccagccatcttccatgcggtatttccttccacgtggaatgtgactagagacacgtccttctctgggatcccataggggaatggatggcaaacacagagctgtgagcccaggaggtgccctgccaatgtcaggtcccattcccctctttccttccctgaggctgtagccaaggtattgcttgattctgattttatagctggttgaaccagggttcatgaggcctgatgaatgaatcatgttgcagcagggcccagggtctctagggtgcaaatggagaggcagcaggtgtagacaactgttctttgcaaagctcggctgtcagggagagaagaggcgggaagggtgtgaaacagggtgtgctcatcctatgtgaggggtgaagggtggggggaaatatgaaaacatgcccatgctggagaaagagagctggtggagaagggtacagaggggaggggtgcaggaagggagggacctgggcaggccttggttctcctcagccatgaccttctcagtggcttttttctatcacttaggtgatgaggttgaaagcatggttattaaatttataagtgacacatcactgggagggatggtcagcacccctcagatgatgacaaactcgggattcaacatgtcttgcatggcgcagatacaccaagttccattttatttatttattttttatttcgagatggagtttcactcttgtcacccaggctggagtgcagtggcgtgatctcagctaactgctatctctgcctcccaggttcaagcggttctcctgcctcagcctcccaagtagctggaattacaggtgcacaccaccacgcctggcttttttttttttttttttttttttttttttgtatttttagcagagacggggtttcaccatgttggccaggctggtttctaactcctgacctcaggtgatctgcctgcttcagcctcccaaagtgctgggattacaggcgtgagccaccacgcccagccccattttccatttaacaagaccccctctgctggccaaagctcacctttccttctgtgcctgggaccccatctgttcctggtccacagaatcttgctctctggacttccacccttcccctcctgcgcccttctctagcagctctgctcctccagcctggggatatgttcagcctcttcaccctcacgtaggatgagcccaccctccttttcacactcttcctgtctcttctctccccgacagccaaactttgcaaaacacttatctacacctgctgcctctccttcagctccccttacctcctcctcagcccatctcctccgctccactaccaggcaccctccttcccacagttttggggggttctgggaacagcttcttttttggctctgccatcagaaaccctgccactccttccatggacaccaaagctctgcctactcaaacacatttgggtccttatggggactcactctctgtcttctatagctccccagccatgctctgctctttgcttggtctggaatgttctcttttcgttcactttccctcagcctagcctgctcttccttatctcccaggctcccgcgtggctctcacttccctggctccctgcccgggggcctttctccactggtccttggtggcatcctgggctcctccgtccttgcagagaggcagtggagcgggctgactaggactgttggccccagtttggaaccccgctctgccttcactagctggaagtagggcttgatcactttacttaaccttccgtgcttcagtttcctgatctgtaaactgggtataaactctcctacttgtgttgtgaagattgacttaaccacctctgggctgtctggtttctctaaggtgtgtctggtatcagcatagctcacctgacaatctctaatccctggctcagagcctggcatactcaagctgtccagtaagtactcacaaagtgactagcaatgatgtgaaccccatatttgggtcagaagtcccagtaagtcccacggggaacagtaggtcatatggcagagtcacgaaggtttaggatgaaagaacagagcaagttgagatgtctggaaacagctatgtctttagactgctttgaaacaacctggaatccagatccaaggtggtggcatgccagctgttttcatggctggagtgtgatgcctgagttcctgtgtcttgttgtagacactcgtgcccctggcctgccagagagagtgatacggctcccaggaaagctggagaacgctgttcttcaaatcatattagcaactaacagtacttttaaaatgctttccatggactgacctatctaattcttgtaacaagcccatgaggcaggtaccattataatgcccacttcatagatgaggaaacaggttcaatggggattagaagcttaaccaaggtcacacagccaggagggggtgctgactgatctgggcgctaaacacagaccctagagctcaagccctgaggtcaaattgaccagaggtacagacagggccccgggagccccctccagctacgtgaatcctgttctgaagccgtgtgtctacacttctcatttgtcccagtgcatggatctagggctgtggggaggacaccagaggaggccactgcttgctcagcacaagggcaggcgttctcctgatgtgagcccctctgctccaggtcggaccaccttgccatgcaacgagctgctcactccgtgatgattttaagcaaaggagaggagcaacttgggcatttccagcttgagaggaaggctggcctagcaacttccaaggtcctacttttcgtgtgtcataatagaaacagtagctgggatttgttgagggctgactgtccacgccctgggctaggagccttcattatcatagtcctcgtgtaggcagtgtccccctcccagtagataggaggctacagcgacatggagtgatgggcagcctgcccgcaggcgcagggcttgtcgatgtcagggtgtggtctgacctaggcagcccagtgtccaggactcactctctcactggctgcacttctcttgggattctgtgacccagggtcagagcccaggcgaaacttatggccaaatcaccattctgttctcagtgccaggcttgtcctgcgaggaagcgcatcattttatgccattcaggaagggagtgctaagcacctgtgttcttctcctgggacataagtggcttttctcagcataggattgccttaaggacaggtgtgcccagaagcaaagctttccagaagccagaggagctgcccttgtgatgatgggaccagctgtgcccaacttgtcccacccttagggcttcgtcctgcctggtggctgcacaggcttggccagaaaggacccatcccctgcccctcccatcaaggaggcagcccgaattggggacagagagagcctactttccccacgtggccgggggagaaaggagaaccacggagctggctcactaatcactcacccctacacccagggagccagaggatttagaatatggccgggctgttcccaaaatgaggtgccggtcagagggaaagccaaagcacggaggacagggttagaattcgcaattacctccatgagttggcaaaacgaaggaagcaacagagcgcggtgcagtgacaggagcgagagggtgctgggcaagggcggccctgagcagcaggaagtgagggagagcagccatatgctcctggcccccagggatgtggagcgtggagctctcaccaggagggagagcccagcctccatctgagtggcctttagcggtcttttcctcatgggcttaatgtccgttgcctacagagtaaaggctatttgggaaaccaaagatggaggaggagacggcatccgtagctagatgtgccacaccaactgtgtactgaacacttcgttagggcctacaggagctgaaaggtggattagacacagtcctggcctcaggggcttaactccaggagcagaaagacgagacaatacaagaaaataattgactctacaggtgcccctccagaattataggccacatgctcagaacgctcagagggaggttgtgtggtcggagtgatcatcaccaagtgcttgaagggcaggtaagattgaatgggcgaggaggagagtggagggtactcctggaggatggaaaacgggggtccacaagagcctggaaaacggcgatgcataagggactaaaggtttgcagaagggcacagtgatcaattcctttggaaagattggttgtggcttttctgtaaacagacaggagtgattaaagatttgggacaacagccaggaaggaactggaactctgtgttctagtgtggaaggctgctctgagcaggaggaattttttttttttttcattaaacatatggactgtgtccctggtggggtggaagatgtgtgggagcaggtaggggtcgctgctgtggaggtggcaaatggctcagttgttctaatggcgtgggaatggggcaaggttggaccctccaaaggggcttggagaggaggcttttgggggcctacagtgagaaacccacagaggaggagatgtgaggagcatagttcattagcagcaccttgagagccagagaaggaggatggcaagatgggactccagattcattgattccttcgttcattcaaaagtgattttggtcctttattggatgtcaagcgtcagcaatacagtgaacaaaacaaagtccctagtctcatggtgtttacattcagctggaggaggcagaaaataaacccacggacatatacttgaaatcaggcaataaggctttgaagagaaagagagcaggaaaagaaagtaggaagtgatgagaagtgaaatgaaggaacctgatttgaggaaggaccactgaagccgagacccaaatgactgagccatgtgtgaccatctggagaaagggtgtttagggcagaagtgaaatcctgcttggtatgaagaagagaccagagtggttggagtagagagagccaggatagagacatgttaagggctagaagtcagagatgaggggccttatgggtcacactacatcttgagtttcattctggatgtcatgggagttcttgtagggcttatagcgagtagagatatgatctgacatgtggttttcataatcactctggccaccatcttgagactagattctgttttttgtttttgttttttttttgagatgcagtcttgctgtgtcacccaagttggagtgtgcagtggtgcaatctctgttcactgcaacctccgcctctggggttcaagcaattctcctgcctaagcctctcaagtagctggaattacaggctcgtgccaccatgcctggctaatttttgtatttttagtagagacagggtttcaccatgtcgaccaggctggtcttaaactcctgacctcaagtgatccgcccgtctcagcctcctaaaatgctgggattacaggtgtgagccgttgcacctggctgagactagattctggaggggcaaaggtggcggaggggaggtggcctaggaagtggaaactattgcatcacccgggtgatgggagggagatgggacttggactggaatgtcagtgatggaagatgtgagaaagactttcttcagggtttatttttcttaacttgttattttgaacaatttcaaaccaatggaatatttgcaagaatgatacagtgaacacccatacccccttactagttgttaacgttgtaacatatttgcttctctttatctctctgtcttcctccctctccttttccttaacatcatcatcatcgttgtcaccaccaccaccaccatcatcatcctcaccatcaccaataccatcatcatcctcaccatgaccatcaccactgccattgacatcaccaccaccatcatcaccatcaccaccattatcatcatcaccactgctgtcaacaccatcatcaccacgaccatcatcaccatcatcatcatcatcatttttgaaccatgtgagaacaagttgccaatattatgactcttcattcaggacgacttcaataggtatcttctcagttcaaggatgttcacttacataactatgatacaattaccaggtttatgaaatttgtcattgttttaatactaatatctaaaggagagttcaggatttatttgtaggtatttgctaatggattgtatggagggtacgaggggaagacaggagtcacagatgattccaaggacttttggccagaccaaacagttgatgagcatgaccaggtcaatccaaggacttgaaatgaatagctgagaggtcttacccaaaggaaaattggaaatgtttgagttttggcagatgagctgagctggggtgttcagttctccagtggacgttgccagagtaattacaagggaagtcaaagaatctggtctctccctccccatccccggtttctctttctctctctctctctctctctctctctctctctctctctcacacacacacacacacacacacacacacacacacacaccccgcatgtacgtatacagactttcttctcccagagatctagacctgagtgtagccatgggcatatctcatcagaatgataagcaaatcaataatgatgcattggactgtaagtgccttgagtacagggatatgtctgctttgctcactctattcacagtgccagtgcattttgcacagatcttggcacttagtaggcattcaataactatttcttgaataaacaagtgacagaatgaatgcccttatttaatacgttatacagagtgcaacgattataattatgtatgctcacaaataactgaattatctaaagtaaaagttactgctacagaagagaagtttctctcttctgtgaaagaagtcagttcagggattcagggagaatatgggctctacagtgtccaggcaaccagattccttctatctggttgctctggcttcctaagcacgtgccttccatgtcatagcccaagatggctgcctgagctcatgccatcatgtctgcgttccagacatcaggagggagaaaggaccaagaagatcatacctcgtttctttaagaacacttgtttgaagttgtcataccactcctacttacatcacattaactaatgtggtttttcttttcagtggccttgtgatcaattaaaatatgggagttctttgactagagaagaatggctattgggggctattaatgatttgtgtcacagtgtggcccacaaggggactgtgtaatgcttctaccacaaaccgttggtattaaaaaatatcaggtgaagtgagctgctgtggctgtcctctgtgctttccactgtaaatatgagcagttatgtcgctagatggactgtgagtgcttagaatggggagggtcactgggagactcctggagagattagtgaaagctctaaggatgctgtttttccctacttttggttctgatatggaggctgcagaatgttaccccacaacaaagccaaggcattggggaaatccctgcagagagtccctaagtctgtgtcccaactgagcctcctgaaatcagaggctgcgtcctattcatctttgggtccctgcacctgcactctcaggagctctggactctcctgtcctgtgtctcctcgcccatatgtgttgagtgaagataaggcaatcactttagattattcagaagttttacaagatgcaacaaagccagtttttcctaactagaacatttgtgaaagtttagccagagctatctagaaagtatgttgatatggacgttgcctcagctccatccgcctacccctgcgaggaggcaggagcagcctctcccagatcaagaccccgctgtgggtgggccgccagctagcagctgggcgaaggccacatttatccctgccctgcttctttattctgctctgtattcaagcttcgtatttccctttgtgtgtgtttagcttagggatttatcaccgtggcttagatctgtgatgaaatagataagcctgcactttaatacacgtggcgtttctttccccataagaattagattaaaggaaatggggcctctgaggaggcggggcagggcaggaaggtggagctgggtggccgaggcaggcagagacactgccagccaagccttggagaggctggggtgcacttcggggccatttaagagtgagccacagagaagcagcctcgtgttttccacagaaagaagctaaaacagcaaagtcttgtaagtgctgtggagccctcctgagtggccagtttggggttgctggcttcactccttgtggtgcagctacaagcatgcttcctgcaattatttgcaagagtcctgggtgagagttcagggcttgcaggtcttcctcgggccacaacttcagctccagggcaaccagagaagcactgtcatcgtagaaagagagggtgaggcatgtaaccttgagcaaagacactgcttaaccttgctgggtctctgcttgcttttctctacttaagaatactcatatcaacttgttagaccctcgtagaggtacgagacaataaacataaagcaacaaagacagtcctggaacatgtttgatgtgcacaaaatggtagccctttgtattattactattagggagctaggatcagtgtcacacaataatccaggtgatctcaggccatttcctccatagttttcaggaccggaaactctgcaatgccctgtggtccatgtgagccctcttcctaagaggctgttacatgggaatcctgtaaggtcagtaatattattatttctattaccaccttggtaatagagtcttaggaaggctgactcacttgttcaaggtcaaacagtttcttgtggtggtgcctgcagtggttacaagagcttataagataggttctcccaactcccgtggttgggtattgcctcccacccttctattattttttatccatagccgtaaggtcactgtcaccaagaatagcaaagagcaaaaagagagagagaaagagggagagagagagaggaggctaaggaaatgacctgcattttcagttttcattagcaggctcacgctctcagtgctgctctgggcaaacacctggctccttagattttcctgtaaaagaagcttgtggtgactttgagggtaataaaggtttagctgaggctggccagcaccctcaggtctgtgggctcgagtgagtcaaaagggctgcttgggcgttctgagccttgtctttttctaagaaggagcgaaatgttttcctatgtaaacattcttaaataagagccactgaatcaacaagccttggtggcgtttctgtttatgttggtgctacataaaggtttgctaaagcaccttgcaagtcctgttttgaaactacttttaggatctacgatggctgtgattgaaatttactccaggtagattgagagtcattaatctgtgcaaacaaatgcaacaaatgatgggattctctgcccactgagaacttaccatctgagtaaacaagatgtatatgcataaatagttaaatataatagctgtgtaaggatttaaaatatgtacaagactgattatggaaatgttcacttattatccttaagaataaggtgctgcatgtaggcgtctggcgagagaggttgcaatacaacaggtagactagcatgaattcaggagtacagatgagaattgtatatggacatccacataaataggagcatgctgaaagttcattcactctcttgagctttgttgagtgcctgctgcataccaggcctagtgccagaggttcaaatgttcaagaaggtagcctgagagctgttggatattgactatgacctttaagggtaaataagacttgaatggtcagaaagctgtggaggaatagaccaagataggaatgggttgatttaaggaaaactatcagggtagaaacatcaggcctcataggagagggaatagatctccccttttgaagcagcgtgctcaatgggttgaatggcatgagagcaagttagagaagagggctggaaatagaaatggaggccttgaatggcaggatttgttcaaagggaattcttgagacaacatcatgatagtggtgtttacattcgcattcataatcaccttcttaaagaactgagcatttcaatttctgattgtttattggtggtatataaaaatacaattgctttttatataaacaccttgtcctacaaacttgcatagtcctatcagttttattagctttttcatagatttttagaatttttacaaacaattataccatctgcaagtaaagctagttttacttcttcccttattatttagatgcctttttttctttttcttgccttattgctccagcaaggatgtatataatatatcatgtataacatacagtcaaagtggtgacaacttattttctaatcttagggggaaagcagtcttttgcattgtgatgttagttctatgtattttggagatgccctttatcaaataggaagagttttcattaatagctagtttgtggagagtttttatgaggagtggatattggattgggtcaagtgcatcttttgtatctgttgagatgatgatacagtttttccttttagcctgttaacatggaaaattacattgattggttttcaaatgttaaactaaccttgcattccaaagataaatcttacttggtcataatatcttaccatttttatatattattatattttatttgctaaaattttgttaagaactttttgtgtctatgttcataaagcatattggtccatagttctgttttcttgtcattttggtttggtatcagagtaatgctgacctcataaaatatgccgaaaaatgtttttttctctcaattttgtggaagaatttttatagaactttaccagtgaaggcatcaatgcctagaatttttgtttattttttgtaggaagattttaaactacaagttcaatttttaaaataagtgtaaagctattcagggtatctgtttctttcaggaacaaccaagcatgactaaaaagtacttgaaaacatcactgatcctagaacattctcaaaatataactcacacaaagcaagagtgacttcagctggctatcttgcgttgatgtgacatttaagtaagcaatggtcaaatgcataaaagtttttttttctcttttaagagcaatttcaatctttgcttggtctcttggaagaaaatccaaagggatctatgatacatttgtggcataggccaaattatctttacaaaacctttcctcatcttcctcactctcaatgcctttcatagccacagaagctgcttccccaaatactcctttttcaaaagaggtccccaaacttaacctaagtgcgtctgcaggtgttaccacctctctttactatgtaaatcagcagacactcttgctctgcatagttctcttattcacttgttgcccagatttttaacatcagagtagagttctagaggcgattcaacaagatcgaaagttctttctccatagaaggtagggaaggggcaagagagcaaaggatttggactagatacgtggtatttcttcttttttttttttaatactttaagttctggggtacctgtgcacaacatgcaggtttgatatataggtatacatgtgccatgttggtttgctgcacccatcaactcatcatttacattaggtatttctcctaatgctatccctcccccagtcccccacctgccgacaggccccagtgtgtggtgttcccagccctgtgttcaagtgttctcattgttcaattcccacctatgagtgagaacatgcggtatttggttttctgtccttgtgatagtttgctgagaatgctggtttccagcttcatccagatacatggtattccatctgctatcacactgcatattcaccattgtaacccggagagacaaatgaataagcatctgtccagccccaacccagaggggcagctgccaagcagcaagtgggaggaggagccctcacttagacttgagcctgcaaactgggatttagatggaatcattcactccaattttccccaaaaccacattccacattcaggtttatagagtggagagctcaaaataggtttacattaaaaaacagtcctgctgtttgtatatgatttgctccaggatagtttcattgatctagcgaagtgtaaagatcattgaatttggagcaccagacctagatattgtcccaacccaatcttcaagtttttcatttgataagtgaagtcataatctcttaacttcgcaggattcaactctattaagtgtgcccacatgaatattaactgatacttactgctcttttagacaaaatatgcaataaattgcatttatatagcactctttgaaagcaactatatatgtacatagtttgtaaatgtatatatgtatcagttaatcatcatatgaatctattgaagaagaagtaattgtttccatttaataggtgattctgtaaggagattcaggaggtttaagcaatttgtctaccattgcacaccagtggatattaaaaccaaaacttcaactcaagttttctgattcaaggtctgattttctttctatttctccatcctgcctctattaaagcacagccacttgtctactacagaattaaaattaagtgggtctaaagcctcatgttgaataaatgcatgcacgtgctaatttttctgttcttttgaatctgaattaaggaaaataagccaattacattaaagtggtgtcagcagatactgcacaaagcttatatataaccctagcaccatgccatatgaactcagtaaatattttctaatgcatagatgtcatgtaacgttgcagatgccagccacctttattgttggaacagggaagaagcatataatgaaagtaaggtgcagttttggatttcaagagcagaaaactttagtgactaatgggaaaattccagttctgttctgtgctgtggagaaacttatctcttatattgcttctattgctattaaggaggcatattggaaaataatctatagaattgtttagctgaagctttttgtgtgctttgcgcttcagacttgatagtttttttggtaggttgttgttccccagttcctttttagttctcctaagttttccttgtttggaaattcttacacttcacaggaaagcctccattagaaaactgactctaatactactacctcaaaaccacacacacagacatacacacatttacatgcacttgtacaaacacgtaggcatgcacaatcctccccctacctcatctagtaaaaagtaaggaaatgattcatatcatttgggattatgttcaacttcaagtaacagaaaactgaagactttatttggcttaaccaaataaaggttgattttctcacctagtcaaaagtcccaaagtaggcaatttctggagttggtttagttgctcagcaacaccttcagagaaccagatgttttccatcttctcttccatcatccttacagggttggcttccatctttatgcttgttacctcatgattgcaacatggctgcccgagctccaggctttttatctacattccaggcaacaggaatggagaagggcagtgtcagtgaccctcatttagctgcacatatattgctgccccaaataatgtggaatttattggcagggaaggagggagacaaattgactactaggtaggtaattcacagtgtctgccccatgtttttagtgcattttcttctctctctgtatgggttcaaataggagttcctcattgaggaatggcttctggttatgtgctcatttgaacaaagttctctataataaaataattcagatgtcccttggaattcatcctgttttttaatgattctattgatgctgtattagacttctatagcactttatattttcactggcatgaatcctacttaaactttgcagcagtcatgagatacagttcttatggctgggaccaaagcaatttagtgatatgttcaacccagatcctccttgtccagggctccattcctctgtccacctctacttcttctaaccacagttgatctgtttccccaggatgactcaattctttggtttcttaactgagccctctccagctggccctgtggcctgctactcagctcaggatgctaaacacgggccatcttgctaacacatgtgtcttttggctgatatgaaatcatcaaaggcaaaaccctggaaaatattcactgactccaaggtttaattgatatatgtgcttctatacacacatgcaccccagaagtaagtcttcctggatgaggctctgcagttagggtgtctgcttattccagtttgatctgaggaacttcaaatgagttgttagaagtctgagttgggattaggtttgcacatcccatttggtgtgtcagacagacagggatggattcctcattctgagacttggaggtgttgcatgatttttgcaggagttgctgccgtttgctttcttcccttcagcttgttgcaaatgatacatctgggggacatatcccaccacccctcaatccttgagaggagcaaatcttgccttgcagttgggaaaagttttgtcttaaaaaggggagaaggggtgtcattttattgtttgaaataatgattttgacaccttttaaaaaatgaatcctactgacagtttggaggcctttgtggaattaatcaagtttgatccaatatgcatttaatgagagcttactttgagcgagggactgatgggacaggaatcaatttccctttttgcccctgggcttgtacagactatgcgcccatgctgcagaggtctgtgtttactatgaaaacctgtggtcaagacacagattagcgtagctgggaaagggctcttgtgcactttgtagaagcttgtggctgcagtgacagtggttggaatgagaggcagggtggtgctggtggtgtggctctgtgtctctctctctctctttttttttttttttttgagatggagtctcactctgtagcccaggcaggagtgcaatggcgcgatcttggctcactgcaacgtcagtctcgtgggttcaagcgattttcctgcctcagcctcctgaatagctgggattacaggcacgtgccaccacgcctggctaatattttgtatttttagtagagacaaggttttactgtgttagccaggatggtctcgaactcctgaactcgtaggtgagacccccgtgtaggaaatgcatccaagaccatgaactataccactggccacctcagcaggaatgagtgtgcctgcaacaaggggggccttgtttttcagagtggcctcacccctgcccatctaacatctaccccacagaccagaccatatgagggactagagcatatctgtgtgtccttccctactgaagattcaggaacagattcaaagggcacacatccacatatcctgggcttacacaattctatgcttttgtttttgctattctctgccctaggaattcccatacccctttgaccacctacggaagccttatcccctaagacttactgaaatgctacttcctctgggaagccctctgtggtacatctaccgccttcattctgctccctccctttctcctgtagttcttggcttgtacctctcggttgcactcccactcattctgcccttgacccaagttatgcatttgaatgatgctggaatgtttgtaaggaaaatcgtagctgttactaggaaagaaatgtttctggggaatcacggaaagattttctcacatgggagtcaggactaacttcagtttctctccaaaggaaccagatcccagttcagaggaaggttcttttattgggtgaaatgtccattcagaccttataggaccccaggatattttgtccagaatctcaaaatgcgtttacttgtttaaatgacatgaattgggaacctcttagaggcagaacactgcatccagccttggaaggaggattcaggagaaataattccagctcttatcagaatgatagaaaagaaaaggtgatgtcctgaatgcctgggaatatgaatattttggtttaagtttattgatatgaggaaggaagtagcttgaccagcagacatgactattctgttttcttgttgaatatggttcctattcagttttttcccatgttttttactttaacaatttttattactcaattaaaatattttcactttagaaacatgtgaaaatgcagtgagtaaaagaaaaaatagccgggcatggtggcatatgcttgtagtcccagttacttgggaggctgaggtgggaggatcactggagaccaggaattggaggctgtagtgtgtaatgaaaagaaagaaagaaagaaagaagggaaggaaggaaggagggagggaaggaaggaagcaaggaaggaaggaaggaaaggaaggaaggaaggaaggaagggaagctactcataattttactcaaaatcccaaatatctaaatttttagaatgagattgtactttatacaatatttcaaaatttgctcttccctggccagacacagtggctcatgcctgtaatctcagcactttgggagtgcgaggcaggaggatcacttgaacccgggagttggagaccatcttaggcaaaatggtgagactccatctctataaattagcagagcggtggtatgcacctgaggtcccagctgttgggaggctgaggtaggaggattacttgagtccataaggtcaaggctgcagtgagctattgattgcaccactgcattctagcctaggtgacagagacagaccttgtcagaaagagagagagagagagagaaaggggaaggaaggaaggagggagggagggaggaaggggctgggaagggaagggaagggaagtggggagggaaggaaagaaggaaggccattgatattctcacttaataatatatcacaaatatatttacatattaacaaacataaaagaacataaaaaataaactatgcatgtagatcattgttagtaacagctttttctttgctatggaaaatttcaaacatatataaaagtagaaagaatggtatgtataatgaatctccatgccccatcacccaacttcaaaaattgtccactcagctaatcctactcatctatagccccaccataactccccaatcatacacacatcactagcacctgattattttgaagcaaattccagatatcacttcatttcatctgtgacatcttaaggatgaatctgaaaagaaaaggatgctttaaaaaatccatccacaatgccattgtctcacttaaataaatgatcaatacttccttaatctcaccaaatacccagctagttgcaaaaccttcttttattgctgcaataggaccttttcatgtgtctaaagcataatttattcagtgagtaccctgctgttggccatggaagatagtagtctttttcactattgcaaacaatgtttcaataaataacaaaatttttttcacacctaaaacagcaggtattttatatagcatttataattgtaaataagatcactattttcttctctctttctctctttttcctccttctctcactaattattgctgatattaaaagattaattcttgtagtctgcctgtgaatagccactgcactccagcctgggcaacatagcaagctatgcctctgtttaaaaacaaaactaaaaactactcataatcttactcaaaatgactagtttacattttggtctttatttgcatatatacctacatttttagaataagattctactttacacagtattcctgttgtgaattctgtcattgccaaccttcttgaagattcttactagtttccattttcttccactgattctcttgagttttctagatctatattcttatcatctgataacgaggatgatcttgcctctttcttttaagtagtcttactttttatttctttttcttgtttaactgcactggctgacccgaaatgaggctaaatgatactgaggacagttggtatcagtgtctcacttctttctagagtggaaatggttctttgtgtggtttatttttgcctgatggtgactgttggtttgtaattgatcttaactgaggagtaacaaacatggtaaaacatttaacacagaatctttcaaataataaatacacaacaaatgtttttgttattattatatttttgtcatggtaaagaggtatactttaatttcctgtcattaagatttatttttaaattgagaatggatgttgaattttgactcctgcctttcttaaggggatatctatttaaataattacttatatttttctttaaactgttaatagaatgatatattagcattgatatagttgtctttcttggactgcaaaaccaattttgtcaaaagtttgttacccttttgaaataatgctaggttttattttctagtattttattagagtatgtgcatctattttcatgagttaaactgtcctctatcatgatttttcagagatagctttgttaagatttgaaatcaaggttatgctagctttgcaaaatgaattggaagttttctttttccatcctccatctcccttaccaccccttccccagtatgttctgttccaagaaattttgaaggagcttacatgtgaaattgccctggaaaagaatcttttaaaatataaatatacatacaaatatatatatatgtatatatatatacacacacacacaatattttccatttattctataattagtacaacttttagactttcttctcagtttgaattaattttggcaattgtactttcaaagaaaatcattctgattccattgagtttattggcatagagctgcaaacagcctctgattctgaaatagctcttctggatcagtgattatataccttttttgttttgtatcactgagtgcttgtgctctctctcttatttctgactgaagttgctaaaaatttaattagttgatagaaccagttagtgtacaaattagtgttggattactaattattttaatttattatttccttttaaatataaaagaacttgcagctgtaagttcttctctaacagtaggtataactgaatcctagatgtgttcatatgtaatatttttgttactggtgtgttctaaatatctgtggtggttgttttgaattatgcttttgcccaaaggttactcggtgaagactgtttcttaaatttcaattggattggctctttgttcatattttgttattaaagtctaattttattgcattttaggtagattttgtgacctaaattatacccaattttggaaatttgtagtttttgtgtgtgtatgcatggcatatgtacaactaatttttgtaactattatatgggcacttaagagtatcttcacaatgtataattaatatatcatgattaggagaaagtgtgtttatgatgttattcaaatattttctttctttttttttttttttgagatggaatctcactctgttgcccaggctggagtgcagtggcgcaatctcggctcaccacaacctccgcctcctgggttcatgccattctcctgcctcagcctcccaagtagctgggactacaggcgcccgccaccacacctggctaagtttttgtgtttttagtagagacggggtttcaccgtgttagccaggatggtctggatctcctgacctcgtgatatgcctgcctcggcctcctaaagtgctgggattacaggcgtgaaccactgtgccgggcctcaaatattttctctctctatatatttatttttgttctcttgattaaagttgttaggaatgtgttaatttcttccactgtgattgtgttttgtattttcttgcattatgccatggaaattgctggtttcctaggtcaaaacaattaaatattgtcagttacatccaggctaacctatgtttatgatactgatatgtgagggtttatgggactttcgtgtctgcttcaggggatgcattctcatcccccatgctcttcgccttgaatgtgtcatgctgtagcgctggtgatgccagccctgactttctgctaggttccatttattattaatttaataataaatttattaataatttaataatttattaataattcaattccattaatttattaataataaattatttattctaaataatccagtagctatgtattcagaaacttccaggtgacatgcacagtagtgggcgattcgaggggtagtgagcagatatctgcccttagggagtgagagttcgggacggggagagagaataaaaacacaggacaaggatgagagtggtacctcccatgcatataattaaaatagaggatgcgatcataagttactggtggcttcttgagactggatgggcagagacggcctctgcattagttgggtagggctgccataaaaaattgccagagactgggtgacttaaacaacacggattttggtggcttacacctgtaatctcagcactttgggaggctgaggcgggcagatcatgagatcacgagattaagaccatcctggccatcatggtgaaaccccgtctctactgaaaatacaaaaattagccgggcatggtggcgggcgcctgtagtcccagctactcgggaggctgaggcaggagaattactttaacccgggaggcggagattgcagtgagccaagattgtgccactacactccggcctgggcgacagagcgagactctgtctcaaaacaacaacaacaacaacaacaacaaagcaccatggatttatttccttaccgttctgaaggttgaaatccaagatcaagatgtgggcagggtgggtttcttctgaggcctctctcccggacttgtaggtggccgccttctccctgtgtcctcatgtggtcacccctctgtgtgtgcacatctgtatcctaacctcctcttttagggagacatcagtttgactagattagggcccatccgaggtcctcattttaaaactatttatttattgtaactgataaaaattttctatatttatggtactgttctgaaatatgcatgcgttgtggaatggctaacccaagccaatggacatatgcgttacctcacatacccatcattcttttgttgtgagaacactgaaagtctactgtcttagcagcgttcaagaacagaaccataattcaatagatctcttgcacttattcttcctgtctaactgaaattgtgtataatttgaccatctccccactcccccacctccacccacaaagatctcattttaacttaattacctctttgataaccctttctccaaatatagtcacattcttaggttctggtggttagggcattaacatatgaattttgtcataatgccctccctcccctttccccctactctgcaacaggccctggtgtgtgatgttctgctccctatgtccgtgtgttctcattgttcaaattatggcttgataggtgcaggaaaacaccatggcacatgtatacccatgtaacaaatctgcacattctgcacatgtatcccagaatataaagtaaaataataataattaattttaaaaatatacgaatttgggggagcacacaattcagctcacagcagcctctgtcaggacgtaacatttacattgagatctcagtaacctagcaacacagggaatgacatgcaaagatcctggggaagaaaatttcagttggaggattatattgagcaacggtcctgaaatgggagtgaacagggtgagtttgaggaaccggagaccagtggtggcgggcagggggtgcagaaagcaaggagacgagatgaacttgcgtccttccggtgggatacataaacttgactgtgattgaattccccaagcagtgagaagtcactggagggtttcaagcaggagccacaatcagattgatttttttttttttttttgagatggagttttgcgcttattgcccaggctggagtgcaatggcatgatcttggctcattgcaacctctgcctcctgggttcaagcgattctcctgcctcagcctccggagtagcggggattacaggcgcccaccgccacacctggctaatttttgtatttttagtagagacggggtttctccatgttcatcaggctggtgttgaactcccgacctcaggtgatccagctgccttggcctcccaaagtgccaagattacaggtgtgagccactgcgcccggcctccagattgatatttttgaaaggtttttccagttgctgtatggattgatatttttataagtttttcacagttgcattctaaagatggccaatatggaatcaaggagctttttttcgcaggtcagttgaaagtgatagtggcttagacagggtgaagtcggtgcattggggatacattttagcaaaaggttacaggggctataggacctgttgatttgtcatatgcaagggaaatggattttcaaggacgactactacatgttaaaagcaagttaggataatttccagagattcggcagtgccctttactaagacaggaaagaatgagagaacaggctttgggagaacattaaagtaacctagtatttccctgagagcatggatcaggaaacttggtggagcctgggcatcctcggaagtactgacacactcctcctgctgggtcatttagcactgacacccagacccagagcacagaaattcccaaatgggaggaggcatgatgctgtaggaacgcaagcatggtgatgaggttggtggggctttgagcacaccagctgtatgatctcgatggatatctgctgcatctggcctcagcgaagtcagtctctggtgctgtagggataagcacaccaacctcatagatctgtcttgaggattcaaccgggtcacacttgtgaaatggttgcaagtcctggcacacgctgcgcagttcgaataaattattattggtactattattaatatccttggtgttatttttgttttgtttttgttttttgagatggagtctcactctctcatcgggctggaatgcagtggcacaatctcggctcactgcaacctctgcctcctgggttcaagcgattctcctgcctcagcctcccgagtagctgggactacaggtgcgcaccaccatgcccggctaatttttgtatttttagtacagacagagtttcaccatgttgaccaggatggtcttgatctcttgacctcgtgatccactcacctcggcctcccagagtgctgggattacaggcatgagccaccatgcccggctggtgttattgttaatatcctcaatactgaggggatatcagctcgaatgactccaacaaaaccttcagagatacccaaaggctcccatacagtcttcactcttccatacatttctccagcctagtaaccaactggctctcacttcagccttgtttttgtttttaagttaaaccagaggctctagacatgtccctaaggctctgagcagtgtgagggttgggtcctgtccaccccaggcctttggcaggataaggggcagggagaaggtagcagctgtggacccaagaagacagtggcatgagcaggttgctccccgcgtgcgaggctgctcctttttgctgatttaacagacagaatcccactgccagtcttgcaaagtttgttcccaaatgagacaatatatatttttttcatagctttatttttctactgttgataacagatgaaactaagaaagtcaaatacagtattcctccctatctgaggggctatgtacgttccaagacccccaagactgaatgcctgaaaccaaggatggtaccaaaccttatatataccctgcacaaatctctctttgcttcttcataatttcaccactaaaagattggttcttacaatagacattagcaacctcagcctataagtcttttttctttctgtattaagttgagaacttttgtgttttcactttaaggaagcactttacagcttctctttggcatatctgacttgccagtatcgctactctgtgctttggaaccattaagaagcaaaataaagctttttcaagcccgcacactaggatagcgcggcagtcgatctgataaccaagacagctactaaagtgactaataggcaggtatccggtacagtgtgaaaatactggacaaagagatgattcacgtcccgggtgggtgggagatttcatcaagctactcagaataggtgagcaaattaaaacttatgagttgtttacttctggaaatttctatttaatattttcagactgcaagtaattgaaaccgcagaaagcaaaacggcagataataggggactaccatatcagtcttctcttggagtaccatagtcacaattgtaccatccaaactaatgagtattcattcattctactaatgtttattgagcacctactaagtctcaggcccatgatggattctgaggatacagctgtgaataagactctgaattccctgctcttggcaacttacagtcagtgggggagacagacagtaaataacaaacatgcccacattccagtatttaatccaaattaatacaaattattgtaagctctataaaggaaataaaggtgacacaataaatgatgggaaggtgatgttggaagtaaagaagtggatgcaataaatgagtcataaaggattttgtaaatgataaaggatgacagggacagtcctagcaagccattttgaggaggtgacgtttgagctgagacctaaaagattaaaaggaagtcatggggccgggtgcggtggctcatgcctgtaatcccagcactttgggaggctgaggcaggcaggtcatgaggtcaggagattaagaccatcctggctaacacagtgaaaccccgtctctactaaaaatacaaaaaattagctgggcgtggtggcgggcgcctgtggtcccagctactcaggaggctgaggcaggagaatcgcttgaacccgggaggtggaggttgcaagtgagctgagatcacgccactgcactccagcctgggtgatggagcgagactccatctcaaaaaaaaaaaaaaaaaaaaagtcaggggagaacattccaggcaatgggaatagcaagtgcaagggcgctgataagccagagagcttggtttgctctaggaactgtcagaagaccagtgtgactcctgcgtagtggaagaagggggtgtgagggaaggttctagagaggaggccagggcatgcagaattatacatgctgcaggaagggacaataggaagccctgatggagtggacacttgggaatgacatggtcatctttacatgtttgaaagatctttctggctgctgtttggagaatgggctgaggggcacaggagtgacttaaaggagactagttaagattataagagtagtccaaggaagaaagaagataggggcttagagtaggtggtggaaaggagcgtgcagagaatgggaaggctaccaaatagatttcaaggcaaaaccagtggggcttgatttgtgtatggattgggtgtggggattgtatggattagaaagggagtaactgagatggatcccaggtgtttgactatagtggtgccatttaatggaatagaaaagagtcctcagtagccagtgctggatgctggaaatgaagacttgtgttttggacatgttacgtaggagacattgcttacctatagagcccaggagcagcctgggctgaaatataaatgtgagtatcttcctctagggagtattggaagtgatggggggatgtctcctaggaacagaatattgagctaggggagaaggggccctaggactaagtactgagggactcgaaaacttgaggtcatttgcatagcaggagcgtgggaagagccccaggtaggagctgatcagaaagggagtagaaggaaatccaggaggttgtggtgtcccagaagctagagaagagagtgcatcaagaaaggggaaataacttaccatgtgtaaagccatggaggggctaaatgattagagaacggaggataccactgggcttgtaacatggaagtcaaccgcaacctcagaaagagcagtcccactggggcttcagggactcgagaggccaatttggatgaagcaaagaggtggatgaggagaagtagaactgtgctgatgacattttgggaagttttgcttggaaaaggagtaaagaaatggtgctgggggcatatggaatcaagaacgtacctcttatagatggaagacaccagatcatgcgtgtttgccatagagctccatctagtggagagtaagagtttggagatggagagagggcatgcagaggagtgaaatccaagagaagttgagtgtattaattagtatataggtttggctgtatgtaagggagacctcgagtagcagtggttaaataagaaaggttatttcctctgcaatgaatagcccaagataattgttctagaactggaatgatcattctactacacgaggttgttcacgaagttggccccttcatacagcttgttcctccatctctagggtccttgtctagggggtccaggacaatataaccctgcatccacactccaagcatcaggatggaagcgagggcaacaaaggagcaagctgtccttctgaggctgtgccccagaggttactcacatccctttctttcaagtcatattaaccagaatctggccacatggtcatgctgagctacaaaggagactgggcaatacagcctttgttcttagtatctgtgtgcttagctggaaatcagtttttcttaccgtagaagaagggaggggaagctgctaggaccctgtcccatccaagtgtagcagtatcttgtggtttctgtcatggtcaaataggaatggaatccctaaatgaagtggggagatattgcccttcagcgaaagaaggagcaattaattccttggtgttagcaggaggaaagagaaaatggatggcggagctggagggtttgtttatctggtggttggaggacgagaaagttcccatctgatgccttctgttttctgaatgatacttgaggtgaggttattagaggttgaggatggaaagccaaagagttgaaaagatcatcataattgtttctagttatggtgtgcttatgttatgccaatctctgctctaaaacctttacatctatgaattaatttatgtaatattttgaagaacagatgaggaagctgaagccaagaaagttagttccttgataaagatcccacagctagtaagtggtagagcttggacttgaacctgagcgtcttcattccagcatctatgtactttacttctgtgcctactgcctctagcctggaaccagaaatatgagatcaaccacttcaagagtgggacacacaataagagaggctgcctggccagactgagtgcccagtggagatttgtgctcgtgagtttaatgtgaaaccaataagctcactcatacagttctgggaaggttcagctgctgagtgcaagtgaggagaagatggtagtttagggtgttccaggtgagtataccaaagagaaacacagctagagcctggagcctgttggacatgcagatattatcatgatagactactgaactcaggctgggccagcaggcaacaggtgatgacaaggagggtgtgatggccagtgagaaagcagtggggtcagtgccatggcagctggggaatgtgctaggcagtgttgcagtggggtgtttgccatgatgattctgaaagcagtacagattctggtaacgtaagacccaacataggagtctggagtggatggctgagggaaggcacagtgagaaccaagaacactaacaaatgactcccagtggccaaaccatgttccaagttcactgtcagcagctagctcaaggaggcagacctcatcgctgggttaaagggagagtgaggagcctagcttttgcagctactcaaggtggctctctgagggtggactgatgttagaggtagatttgttcagggatggtagaaaatcagagtcagctgctgaatgtgctttgggtctagtctattaggttgatgcaaaagtaactgcagtttttgccactaaaagtcatggcgaaaatacatcccctttccttccatgaccaagaatggttgaatcttctgtagctcccatgtccctttcacaaataaaagagctactcttcagtaataaagcattaggatggaccacatttcttcattgtgtcattgtgacctctagtacattctattctctgtctggattttaatgttctcccccataaaataaagcagttggatcggaataatcatagctaatatttattgagaattactgggtgccagatgctattctaagtgatttacatacattatattacatttaattgtcctgaaagctccatcagaggtagatattactatttctggtgttttttttttcaatgcaggaactgagacacagagaataagtaacatgctgtattcatttcctattaactgctaaaacaaattaccgcagatttaaacaacacaaatttattccctgtgattaaaacaacacacatttattcttttacatttctgggccagaagtccaaaatagctttcactgggctgaagtcaagatatgttagggctggttccttctggaggctctaggggagaatcgatttccttgcctgttccagcttctagaggccatatgcattcattggcttacggtcctttcctgcatcttcaaagtgcatcactccaatctctgttttccccatcccatcaccttctctctctgactctgaccaacctgtgtccacttataaggatcccgtgtgggcctacccacacaatccagggtggtctcctcatctcaagaaccttaacttgatcccacttgcaaggttccttttgccatgaaaagcaacaccttcaggtcaggtgcggtggctcacgtctgtaatctcagcactttgggaggctgaggtgggcagatcacgaggtaaggagatcaagaccatcctggctaacacagtgaaaccctatctctactaaaaatacaaaatattagctgggcgtggtggcatgtgcctgtagtcccagctacttgggaggctgaggcaggagaatcgcttgaacctgggaggtggaggttgcagtgagctgagatcacgccactgcactccagcttgtgcgacagagcaagactccatcttaaaacaaaaaaaaaaaaaaaagaaaaacaagaaaaaagaaaaaaagaaaggcaacaccttcacaggtttaaggactgggatgtggatatctttgggaggcatttttctgtttaccacaatacccgaagcatgagttcccaaccagtgtagacctgggccctgggcaccactgtgccgtactgacttaggatgggcaaacatggggcatgcaagccactgcccttctcttcgtgtccatggagcactggcaactgactgcagccctctttccttcagaatccgagtgcatcttagaatccttctcaacactgttttccaggcagccctgtcagttgacccgaactgtcaggcacgatgaagcctgtgggccattttcagttttgatctctaagttttcatctgggtgtcacatccaagacacccgtggcaccagtgagcttttagagagtgagttgtggcaagcctgtgtgcccttcttgggagagaattccctttttgccagtttaggacttttttttctttttctttttttttttttttgtaattcagtgactgtgggtttaaatattaccccttcataagagatggctctaggaaaaacaggcttcttatttcaattccccggcatactggccaggaacctggctctttgtgaaatgctagttgataatttcagtttgggtggtagggaagggaggtggagcacatgggggaacacagccccaccctcccgccccatctgcttgtgcttcaagaacatactgtaattgttcagccctgtatggggtggggggagagaaaatcacaacatgttcacacagaagagaaaacaaacagcctttaataccagtcaagggaaacacgtttaaagagtttttttgcaaggcctgaagcaaaagaacttctccagtacagctgcgtggagtcccgtgctcagcttcactgtgggccttccacgtctagctgtcagagcctctctgcctgtgctgagcccggtagcagacccctttaatgcagctggaaccctcactagttttcttcctccctaacagcctatgatgtagtggtgggtactggggtggggagcattggaccctcaagttgaagttgcactgtttatctcctgggtgcgttgcagcccccaggaccattaattacacattctccaggcatcaaattccccaggtgggtaaataattccattgcaataaggggatggtacattgacctttatttgtctttctaattttccacttctttgggggctccgggctttgctagggcctaatgagctctagtccaaatgattgcagcactttgggtcagtatcttcctaaattcactcctttgcaaaggtgctgaccagagaactgtgataaaggctttccccactctggtcacaccgtgcatgaatgagtctttctcttccaggcgtccttcagtcaacctccttgccgttcccctccttcctgcctcctccagccagaggcagcttccagaaaacttcccactcttactgcatttcctatgaacgttcctgcaatctaggtgtgtccttgtggatccccaagtcaatgtcatgccggtagaaaggatgggaatgcaggtgtgactccttcaaggagagatttctcataaggggaaactgccagctgtaggggtcctctccctttgcatggttttggctttaggagccttgtattcgtccgttttcatactgctgataaagacataccagagactgggaagagaaagaggttcagttggacttacagttccacatggctgggaaggcctcagaatcatggtgggaggcaaaaggcacttcttacatggcggcggcaagagaaaatgaggaaaaagcaaaaacggaaacccctgataaacccaccagatcttgtgagacttattcactattatgagaatagcacaggaaagaccggcccccatgattcagttacctcccctccgggcccctcccacaacacatgggaattcttggagacacaattcaaattgagatttgggtgggggcacagccaaaccatatcaggcctagagcttaactttaggcctctgttggagttttctgaaagaattcaaattttgtcaggctcagtttcctgacagcaaaatttgaggagttgtagagagtgaaatagaccacaaaatgttatgctggaaggaacctcctaagtttgtccagtataaagttcttattctgcacatgaggaatttgctcttaggtccagcagccagaaagtggctgacctgtgtccagaatccaggtcccaggacatccagatcttttctcagctcattttttacgtggtcacctatgcatctgcctgtattttattgcaataaggggatggtacatctggtacatgaacgtgccagaaacaggcaagcatttccttgccaggcctaagcttttgaaaagcaagagagagagggagagaagcagatgttgaggaaatagcctgagtgcattggtggcctctggaacatctggaccagtccaagccgtcttttgcttccaacattggaagtcctgcttaggtcctagcaggaagatgatttgtgatccaaccatttcacatatagggccaagagggcagacccgaagggttgcagctctcagcaacagccctacccagggaccgaggttgctatagaaacaatatgggggtgggggaaaaagcagagagtcatccaggtggagaggaggggggcgtttgaaatgagaggtttctagatgaaacagacttcctgcaggttctgctggagtttcattgaaggctgatggctttgtcatttcccatcaagctgggctgtagcatggggtgtggagggctcctgggaaagaaagacgtctgactgagtagtgtgatgacgcccccaacccagtgcagtgcagtgcagtgagcagcctatgtgcttgtatgattgtgtgatacatacacaattgtgattacctgtgtgtgtgtacgtatcagtgtgtgattttgtgtgtgattaccagtgtagttatgtttgagtgtgtgtgcttgtgtggttttgtgtgtgtgtgtgtgtaagattcagtgtgattgtgagtgtggttgtgtgattgtggttgtgagtatgtgtgtggttttatgtgcagttgtatggttgtgtgtatagttgtgaatgtatgtgattggttatgtgtggtcgtgagtatggttgtgtgtggtgttttgtgcatgattctgagtgtggttgtgtgtgtgattgtgtctggttgtgagcatgtgtgtgtggttttgtgtgcagttgtatggctgtatgtgtggttgtgtgtgaatatatgtgatcacttgtgtgtgactgtgagcatggttgagtgtgtgattgtgtggttgtgtgtatgtgagagtgtgatcttctctgatgctgccatgaggtgacgggattttttacctgtaggagagccacacagaaaaaggccacatgcagaaggctgagcctggggagccatctccagcatacagaggacaagggagccatcaggcctggtgctctcaagcccccagtcccagttggccatgcgtgtcactcaaagacccttctctgccctcaatacctgcagcacaaaaggtcataataaaagctcgttgtaaggatgactcctcagaggagtgtgctgagttgggggtaaatgtggggatggggacatgccatccctgcttctgtgtttcctccagttgtgtttctagggtgggcctgaggtgggtacagcagtggaagggcaggtgcccgagaagaggccatgtttccagcgtgccaaaagctgcagggcctgaccggctccatatccaggagcagatgtgaggatccccaggcctcactgtttctgcacagacgaatggagcagaaggccatatcaggaaggccttctaggatagaagccctttcctgggaagctttgggtagtttgcacctttcctggtgagcgatagggtccccagtgggtaacgagggcctgactggccaagaggcccctttgctctaggggagctgccctgctccagtgagaggggccctggaggggtcagtgcctggagttggacgaaggcactggggaggtggccgggtggcagtgtgaagtggtgcgaacaggaagatgtgagcttcacgagcagagggaggatgatcacacagcatctcacgtcctaggctcaagatctaccttttcctcctacagctttgatctcaacacctgcagtcaaaagatgacggcccctgcttgagccttgctctgtgaggtggggaggaatgatgcctgggatgcctggtactgggatgcaatggggagaagccagcagagagaagcaaagggcgggtgggtgctgggaggtaggagaaagggtattttgccagcagcattttgagctgattggagaggaagtgaggagtgggcacaggttggggaggcatcagaagacgagatgagtggggaccacagcaccctttagggctatgcttcagtgatgatgccaaggaaggagtgccagtgaggtgtggaggagaagagagaagatcccaaaataactctgggaactttccagggacacttcaagccggagtgtagggaaactcagccctgagacttgccagaactgttcccggtaggagctggggatgagggctcggtgccaggcaggtctcactgcgcttggccacttgtaagagacctcttcctgctgggcttctgggtggctggttggtcaaagaggaccaaagagaagcagaagcagtgctgtgatagttcctcagaccgcatgtttcgatgcacagctttgttgttccgatttttatgtggttcaaagagtccttccacagttacaagactagatgtcacattgacctgtggtgttggggcttttgaggcacttcttcatgcgtcacatctcatccctggtgaagcatagcacctgctggtggtgtgcccttgggcgagttctggaacaacttttgtgcctccttttcctcttacaaaaagcagggctcctaagatcaactcattaggggtatactgtttacactgaataagcaagcattcatgaagcacctaggacattgtcagcattccataaaactagctacttcatggatctttgtacaacccttttaaccatgaagtcatctttatagtcaacaagtaagaaaaccaagattcaatgaatttaaataaatttctgagatcaataagcaatgcacaggaagagggggagcaaagctaatggaaacaaattgcaacgtgtcctggagagcccctgaaatggcgggagaagggcccgagttcaggttgcattgtctgtgtcgcctcacagactgctgcacagcaggctggattgactgatgaagcccgcttgggatgacacactcaactgctgtgacagagattcaaacatgcatcaagaaatcggaagtttctctcttttgtaacagtctttgagtttggtgttgcgggtggctctgccattccctaggcccagaacccggaacattttctttgtggtccaagctggaccacaacagtctgtgctcagccctcagggcatgacagagagtggaggagacaggcccaccctgccccgagcctccacctgcgtgtagcaccatcacgtctgcttatgtctcggagcggaggccaacagctagggaggctgggagatggggtggactgtccagctgatggccaggctctgattttattaccacagagaaagggagaaggcattatttgtgggcagttagtggtcttcactgtcatagtcagcgcctctgaacaccagatgcctgtgcgtacccttcttcttacaaacaggacatctgccaccgtgccccaaagcaaacaaccccaccaaacctcatcagctatgaagacctgaaaaaatagctcattttactgaatgctgacagtgtactaagtgttttataaattgttgcttattcactgcaaaccatataccactaattaggttgatcttacctaggtctgagttcaggatccctggatcttaagcaattctcctctcatgaggtctggattcccgatccagaggttgaaaaaggaaagtaagtgatctcagccttcccccaccacaagccttcatccatctccccaagacctccccatacaggatgcaatggtggagcagagccgaacaattcacaagaacagtttccattgagaaaagagaaggagggccacagagctgggccacagcaatgatgggcttctgctgggtagaaattgccttgagagtggaggaggtttctgattgagaccctggttccgctctctgggaagcatgcccttgtttatggccatgatatactgtgtccactgtattcatccttggggtcttcgtttgtgtcctctgtgactgcacctgagtgggcattggtgagcccgccctttggagtctgaaaacttcgttacttgcttattttttggatgtgataagggctgtggtggctttaggcacagaacagtcacaggttttttcaggcccagtccagtccttctttggcaataaattcccacagatgacttaataggcttctggtctacttgcttcctgtcagttccatgttccagcaactgcacttagtattctttcctagacatcgctcttaaatctgctttatcctttgcttctttgacctatccccatctcctttatttccatggtgacttgtcccatccaaaaccagccgtaggagttggtggaaagggaaggcaacatccttaagttgatctttgcctaaaagatgcctctgaaagaaggctttgaagaaagcagtgtatctcctgatgttcagaatatggaagcagatggcatttcaagccctgtttctcgcaaccccccagtggaaaaattttatttcttctatatctctttgcaaaataacctttaagacagtgccatatatttatttatttatttttgtttgtttgttttctttttttttctttttttcttttttttttattatactttaagttttagggatatatttagtactctgttgtctgtaccagttagagtctaagttgctctactcaagagatctccaaatgcagtggctctattgagataactgttgcttacacaactatctgagtttcaggttgacaatgagctctgctccatgcattagcttggggagctaggtttcttccatattgttcgcctgccttcattaagtcattgtccgtgtctgcatagccaaagctgggttccagtgtcaattctccagcttatcggaagaggaaagcaagaggaaggaagcaggtccatcatctctcagctttcagcccagacgtggctcacagtactcttattcatctttcttagttgagctcataggcacatagccacacctaacagcaagggaggctggggaatggagtgtgtgtctggccacctgtgtgtcaggttattgttctcctaccatggaagacggggagaatggattgggatggacattgagcagtgtgcatcattcatgctgtttgcataaagtctatgctctcatgaagtttaccttgacttgaggtaaacaaatattccaattcatagtataacttcacataatggtacatgctatggagaaaaataatgtgagtaaagggatattgaataacgaaaattgttacatagataggattggaggacccttagaaatgccagcccagcctttcattttacagatgagaatgttgaaggtagaataactaagaagtgtttagtatcaacaagcaaatgaaaggagtgtactagaaaaaaggcagtttcttccggtgcctccaaataatacagcggagtttggtgtctgagctgttgtcctgatggtctgactttggtggggtaaggaagtgggcactagggaggttgatgcccaggtcaccaaaatctatcatggaagggcagggttagggggcctttagaaatgctggcccaatctctgattttataggtgagaaacctgcagtccagagggacgaaccatctgccctgaatttccttagtgttttggctttttcacaatttctgttcaggaagatggccatgtaacaggcagaaatgccagggtggagaaggcacagctaaagaagcaaactgccagaattccatcagggtgatcccagctccctaaacacacaaacatctgcctctgcccaacccttcctcctaacctcatatgtgcacaggaatgcagcaaattaacctcctggaaatggcaggagcgtggttttctcccttctgcatccaaggataccaacggagctttctcttttcccctctaccaaaggccacagtatctcagacttcccagtacaatttccagagtgctttattaaataactcactaaacaccccagatactgtgatcggctacgttcgctaagccctcctcatttcacaagctgatccaaaaagcaatcaagtttgtccagcatgatttgttctttaataaagaaactctgcgatctcacagctgatctttgcccagggctcaggctgcaaccaatacttgagttctgttgggtaagtatccacaggggaatctctccatgctcggtggctgcgatgcaggcaacagctgtaaagaaaatgctttgttatgtaaagggaagaacaggcaacctttcagagtcagactggaaggcacagtggcaaattagttcggtaaacctgtaggctctcagtttcatactttcaccagatactaaacttccaaagattgggcactgccagtggagcacgaatcatccacgtggctttttaaattttttttgagacagggtcttgctctgtcacccaggctggaatgcagtggcaccattatagctcactgcagccccaaactcctaggctcaagcaatcctcctccctcagcctcccgagtagctgggactacaagtgcatgccaccatgcttagccaatttaaaaaatgattttagagatggggtcttgctatgctgcccaggctggtcttgaactcctagactccaaggatccttctgcctcagcctcccaagtagctggaattacaggctcaagccaacacgccccactccacatgaagcaagtgtttgctggcagaagttatacagaactggccttcatcatttagggagaataagttactagttgggcctaattgcagcttgttttctgtaataatttcagtcgatgaatatgattgtttctcatgtggaacctgtatctattctgtaggagatccatcttatcagtgaccaatctgttgtgtttcttcttttggaagcaggaagataacctgagaacctggattgggccattccctgcttttccttttttgttctcttactttctgatgctttgatgttttaacttctgatgttagatttttaccctcttgtgggtgataactgaattctgtgcagtggccatactctaaggcatcatcaataatttacagagtggtttgtcaataactttagctctttattaaatcaagtgaatagatgttccctatgcaagcatttgctttgccccggctttgtgtgataactttggcagctcactttagaaaaagtgcttgtttctcttttaaggttcttcctgtacagagagatttctgtgctttatcttgattttggatttcctttccccattttcaaatctggaatataagtgtcaagaaaagggatttggtcattcattcactcacttattgaggcattgtcctcagctgcatggccaaagctgaactgcagcatgaggacatccagcacttttcaggcttcagcccagaagtggctcatggtacttaatcacctttcttaggtgagatcctaggctcatggccacatctgacagcaagggaggctggggagtggagtgtgtctggctagccatgtgtgttaggctgcagttataccacagaagatggggagagtggattgggatggacagtctccattatacatgctattttcttactgtcttgacttgaggaggtaaacaaatattcaaattcataatgactctgtgtgccaggcactgttttagggttgagactaccagaatgagcaaaatctgtttacatatgtgtcataatactgctgtcaacccaaggctgttgacaatcaatagacaactaagtccattgtataacttcacataatggcaaactgtatgaagggaaataatgcaggttaggggatataagatgatcaaaattgctgctcagggtggtcgagaatgacaaagccagagaatgcaatgccctgagactggcctgcagttgagttgtttgaggaacatcaaggagtcctgaatggctggaacagaaggagcatgaggagacagaagaaatgaggtcactagagcccatcatgaaagacctcgtgggccagaggaaagctctggactttattctaaatgagatgggaagctcttagagggttaggggcaaggaacagacaagatcatatttatgctttaaaaagatcacctctgggctgggcgcggtggctcatgcctataatcccagcactttgggaggccgaggtgggcagatcacaaggtcaggagttcgagaccaacctgaccgacatggtgaaacctggtctctactaaaaatacaaaaattaggctgggcgctgtggctcacgcctgtaatcccagcactttggggggcctaggtgggcgcatcacaaggtcaggagatcgagaccatcctggctaacgtggtgaaaccctgtctctactaaaaatagaaaaaattagccagtgtggtggcaggtgcctgtagtcccagctactcaggaggctaaggcaggagaatggcgtgaacccaggaggcggagcttgcagtgagctgagattgcgccactgtactccagcctgggtgactgagcgagactccatctcaaaaaaaaaaaaaaaaaaaaaaaaaattagccgggtgtggtggcaggcgcctgtagttccagctactcaggaggctgaggcaggagaatcgcctgaacctggaaggcagaggttgcagtgagccaatatcgcaccactgcactctagcctgggaggcagagcaagacttcgtcaaaaaaaaaaaaaaaaaaaaaccgacaaacaaaaaaaatcacctctggctgttgtgtggacaggaaactaagtattttctttggaatctttgcatttatgcaggtgagattttcttgtttgttactatatgatgtggcaggtcttggagtcatggctatactagtaaaatgcattggaaaatgtattacaaatctgttgtaacacaatactagtccaatgaattggaatgcttacctcttttttccttagcagcataagtataaggcattccttgaagcttcaaaacctcttttgtgggggaacaaatttggaaaattctttcataatcaacagtgttttatgttttttaaattatactttaaaaaatagcacacccattttattggcattttcatataactactctgatgagttttaatctctccattgttaattatattttctttcttattgctagagatagctagctagatatttagatttcttttcttttcttttcttttctttttttttgagacagagtctcactctgttgcccaggctggagtgcagtggggcgatcttggctcactgcaaactccgtctgccgggttcaagcgattcttctgcctcagtgtcccgagtagctgggattacaggtatgtgccaccacgcctggctaatttttgtatttttagtagaaatggggttttgccatgttgtccaggttagtctcgaactcctgacctcatgattcgcctgcctgggcctcccaaaatgctgagattacaggtgtgagccaccacacccagctgttattttttcttttgttgataaaatatgtcagaaattataacgctttacttattttttttggtcactgaactaagtttaggacttatttattacttacatgttttctaaatgtattaattgccacttttatccattaatccttttctcttcatttccctgagttttattatctaatatactgtgttgagggcttaattaatttattatcatgtttttgtttaattattaaattataaaaactatgaatttccttcttataacaacccttttcacattttgtaatttttgctatgtattattctcactgtttgttatggtttttaattagtcaatttgtttacctctttaatacaaaagttacttaagattgtatttttctgaaaataatatctgttgctttgaaaacgcacttcatctataaatgaataggctaaaaagcaaaatataccactcacctccttttttactcctagatcaatgattccttagttgtccaaagggatcactacctttaagaggaagcatccaaagagaccttgtccaaacacatataaaacaatataagcatatatggttttgtcaaaatgaagtaatatcatagatgtcctcccaatttctttatttattcaggaataagctatggcagtatccatagttctatttcattctttttaaatggtcattttataatatggaataaatgtatcaaatcattcccctaccagtgagcatataggcatctaggttgtcgttttttaaaaacaatatatattctccttgtgcacttgtgcaaaatttgtatagaatgctagatcaaaattactcccattttttctttttataggtaaaggcgttgatgtgcttataaactctgtcaaacaaacaaacaaaaacaacgatttgatttgtaccatttgccaatttccctggtgtaaaaattcccaccatgggcaacttcaagctaccaactcctctaaaaaatattcttaaatatttaactacagacttgtgtaagccagttcaaatcaattccatctgatcctagcacaccacttcaaaaagctgaattgcctctaaaattattgggttagtatatactcatgcagtatctggtagtgcacctctctctataacttcagtaaccctgaatgttaagaatttttctatttttccaatctgagttttaaaaattgtatttcactgttgtttagtttgcttttcttttcatgtgtttaaataccacttatatgtcttctatgaatagcttattcatattattttcctaccctcttttttaaattcaacaacattttgagtcctttctacatactgtgaattcctgtagctgctaaggatagaaaagcgaacaagatggattcttttctctgttctagtaaaggtattctagggacatgatatccagaaacgagtaatcagacagacaaaattattgcaaattggaagcaaactatgaaggtgggagctatacatggaagctaaactagaaattaaaaggggcatctcttttaaccgttaccttttgggaagccctccctggggaggcggcatttaagcagggatttgaagggtatggaggagtcagccaggtcaacagggtgagctgacaactgggaaattgaggtggtgttgctaagccttccaaacagcagcaacaatctctgcaatctttctgagaactcagggagattagggaagaccagcaagtcaagagcctggtgatgctggaggagagatgagtaagatgaagacggagagagagagagagaaggaccagggttggatggccggccactgaaggtttttaggtagagaatgatgtaatgctattgaaaataaagatatactaatatcttttacaactgtgcatagaatagattatagagaggcaaaagaggtatctgggagtcagtgaaaagagactgtgctgtgatcatcccagtgaacagctcagagagtcccattcaaactgaactctgtgctctgctgttactgacagccctgtggaccaaactgacagactatgcccttgtttctttattggtttttaggagtattttagaaaatagatacattttggttactatttaagttgcaaatatttttccatagttgattataacctatttcatgattcaaagtattaacattttaaattttcatgaagttgggtttgttcattttttcctttattggtgctgagtatttttttgtcacattaggaagagcttcccctctgcaaatttataaaatatgcttgcatgtttttttctttcaatgtctatattgggggaaaaaactttagattttaaaatgaatctgtaaattactttggtctataaataaggtaggaaactaagatatatattatatatatatttgtgaatatatacatgttcactgtgtacttttacgtcattccatactgttttttcatttttttgtttttttttttttttgagatggagtcccgctcttgttccccaggctcgagtacaatggcacagtctcggctcactgcaacctccgtctcccggattcaagcaattctcctgcctcagcctcccaagtagctaggattacagctgaccacctccacgcctggctaattttgttttttatttttagtagagacggggtttcaccatattggccaggctggtctcgaactcctgacctcaggtgatccacccgcctcggcctcccaaagtgctgagactacaggggtgagccactgcacctggcccatgctcgttttttcaattggagctctataatccattttgatgtctggaagtgtaaatcacccctcatcagattcttttacaaaatattactggttgttcatgtgcatccacttctctttatgacttctagaatcagtttgttcaagttttatttttaaataaatcagtgagattttagaaggggacatgaatggaattcatagcttaatgtggggcagattgacattttaaacatcttgagttttcatatccagaaatatgtcttttcagttgttcagactttccttcttgtccctttggcaaaattttcagtttttaatcctagtgttctgatacttcccttgtgtttattacaaggcattttatcatttttcttattaaataaatggagttatttttcattggattttgccagtatgtggggaaagttattgatttttctgtgtttttctgtaactttattgaattttcttcctagttttaatagtggttcagttgactgccttggattttgtaagtaaactgtcgtatcacctgcaaagaatgacagctatgcctcttctatttcaatatttatttctcttcttttttttcttattacattgattccgacctctttaaaaaaagagaaatatagcggtaacaggcatcccttatagaaatgtcttctgggacacatcacttagttaatctttacaggttacaaaaaaatggctttttactaaaaagtgacttttcagattacaatattgacatttaaaaaagatttttttaaaaaataactttttctgcacttcgaatgatcatacgatatttcttttttatgtcatgaattatataacatattttgattttccattcttgaactttccctgcattcctagaattaattcaccttggccttgatgctttattgtattactacactgataatttgtttgccaacattttattcagatattttcccatcaaaatttggtttggtttaggtatgagagccaaacatagagttctgagatttcccttatatttattacaagacattttatcatctagacttaaaaatcactgaattttttgttaatcattttttatgctctgaagtggtttaaataacaaaagtgatatatattatttaaaagttgtatcaaactccatcatcaagtgatctggtgcattttgaggaaagtcactctttgcctatctgctcattatcttcattgctactgacacattaattttcattatatcctgagctaattttgtctagtttatctaatgcttggaatttattgatataaagttgaacatagtgtttttaaaaaaaaaattagttgtaaagttttcacagtaactcttgttacttttgctttgccatttctgatgttgtgtgggctcatgtgagtttactttctttagctaagaccagtttttctgttttatttactggacttttcagtaaacaaggtttgggtttgattttcaggtctttttttttttttttttgtattcaatgggaatctccttgcatttccattagttccatccttctctctgtctctctctctctctctctctctttttttttttttttttttgagacggagtcttgctctgtcgcctaggctggaatgcagtggcgtgatcttggctcactgcaacctctacctcctgggttcaagtgattctcctgcctcagcctcccaagtaatggggattacaggtgcgtgccaccacgcccggctaattttttgtatttttactagagatggggtttcaccatcttagccaggatggtctcgatctcctaacctagtgactcgcccacctcggcctcccaaagtgttgggattataggagtgagctaccacgcccggcccatccttctcttttatgtagacttagtttcgttcattcttattttcttacaaatgtatttaagttgataacttttcctctgagttagactttggccacatctcctagactttgaaatatagcaggagtttgttttattattttttaaatgatgtgtaattttagcttaatgtcctattttacataaaaattacttggaagagtttttatgtttacattagaaaatattccagacagttatgattttggctgttactcactaatatgtattttaatttgagaatgagctcctgttaccatttctacattgagaggcttattgatatttttttctggcttaatgactgatttttctaaatgttttatagatgtttggaaaatacatattttatgtttatatggctacctgtttttgtgtataatttatatatcttatttactatttggctctatattttaaaaaccttagtgaattattatgtcttttgtcataattgtagttttgtcaaactctcttttatttctttgaattttgctttaaatgtttctctattgtattttatttttgttcaaaaaaatttatgattgctattactttggtttatagtttttaccaaaatgcagtatttgtttttatctgttttgatgctttttttttgccttgtattatctgttacctaatatttctagtcctgatttcttattgatcataaacatatagtttatctttgttcagcactttttctgcttttctgtatcattttgtttatagaatatatatacataaatacacatatgtatatttggtggttgtttgtttttacttcttaggaatccttgaaaaataattgaattgcatttcacaaccgcagtttaaataattatttcgattttgttttttttaaactttgtttttgttttgcttacttacttgggtgcctgtctgcctgtttttcttcctttcttccctccctccgttctttccttcttttgcttttatttttgtttctattttggtagtcttctttccgttttaaaaacagattgaatatttggttggcaaattctatgagtgtttatatttctgaaaaaattctttattttattattctagatataattattttaattctttttgttaactttttttattatagcaaaattttagacaaatacaaatatatgggggtggtaaggtaaaccctttttacttatccctcagccattcttggcttatctaacctgtccctgccactcattccacctggattattacacttctgcattggattattttgcagcaaatcacagacatcacataatttaatccataaatagtaaattttttttatgtatttctgaaagacaaaaagacaaaggcactttttgaaaatataatcacagtgccattatcacaggaaaaaatggagcattacttccttagcacattgaaattagattcaaattatctgaacttcaacactttgaaatcatcgttccattgttttatgacacctagttttgcagctgagaagtataatactaatctctctttgtaactgcctttagtcttgcttttcggaaactggcaatatttgctttttttacttgggatttacatatttcatgtatttccttatcttgtgagctccgaccacactaggcctcgtttggcttcgtcctgtgccaagccacagggcctttgcacaagctgttccatcttcttagaatgctgtcttcacatgtaccatctgccaccccctaggaggttctttcaatgtgagcctgtcccctgcttccctgactggctacctgggcaccctcctggcttgcactgctataacaccatttacctgttcctggttgctcttatcagaactgcaaatgtgcattttatgtatgtacgtatgtgtttaggtataatatctatttttcctactaccataagctccatgagagtagggactgtgtctgtttttactcttcgttgcatatgcagtatctaccatcgttcttcacatttgataaacgtttattaaatgcttgaatttttggaggaataaatgacaaatatcctcataaggtattcagtgtctttattatgtaaatgactttggattttttttcattccgtccttttctgtccctgctcctagaattctcattagaaggatattcgattttgctcaaactatctgcagtggcttttaacttttctctcataatttggatctgttatccttttggctagagtctactaatttgtacttcaacctggtctattctagtattcagctcttcattggtttttgtttttattatattttattttctaagacctgtatttcttcttatgttttttttttttttttttccttgagatggagtctcgctctgtcacccaggctggagtgtaatggcatgatcttggctcactgcaacctccgcctcccgggttcaatcgattctcctgcctcagcctcccaagtagctgggattacaggcctgtgccaccacgcctggctaatttttgtatttttagtggagacggggtttcaccatgttggccaggctagtctcgaactcctgacctcaggtgatccacccgcctcgcccttccaaagtgccgggattatgggtgtgagccccacagccagactgtatttcttattaataagagggtatggttgtgtctggtgtaatagtctctcaaaggtctctgagaatactgattttacttgttttaaacttgttttctgtttcttgagttcactctatcttcagggattctttagttggttcgctctgatacatctttttcatactgctgttctccttgaggagttgcaaatgtggattgccttcttacttttaaaattaatactctaaccatctaaataagtcatgtttgactagccttcttttacaaattgaaagaaaatgataacatagtagctttatgattattcaaattcttctaattctccctctttgaggatataaacactgttcaaaatgtattcaattccttaaagtgtttagctaacatgaagtgagaaccacattgctagtcattggagacagacatgaataggtttctgttcttttccttatcagttcggttaagtaaggcagaaagtacatgtaaacaggtcacaatactgcagtgttaaaaacaattatgacagcggattgcctaaaaagaaaactagaagacaagaatttggaaaagttctaaaacgtttgaaagggaaaatcagtggctatttcctttttgtgtccctagggttctgaaaatcagtggctatttcctttttgtgtccctagggttctgaaagatagtaaatacttcatgtttaatagatgaactggcattcagggaatgaggaaattaatgtaggctgttggagcagaagtcttctatttcttaagtaaatattttcaatcatttatgtggacatagtgaagaaaactattctgaaccttagttgtatctcgactcttttgggtacattgtagatagctttgatgcttaacaattaagtgacaaataagctgtttcagagaaattgggaagcaataggtcttaattccccagtctgtaattccctggtgtttgtgcatggggggtggggctggtataagagagagagagaagaggctgggtgctgtggctcatgcctgtaatcccagcactttaggagcctgaggcaggtggatcatgaggtcaggagttcaagaccagcctggctaacatggtgaaatcccgtctctactaaaaatacaaaaattagctgggtgtggtggtgggcacctgtaatcccagctactcaggaggctgtggcaggagaatcatttgaactctggaggtggaggcttcagtgagccaaaattgtgccattgcactccagcctgggcaacaagagcgaaactccatcaccaaaaaaaaaaagagagagagagagagagagaagaaaccaaggaggaggaggagcagcagcagccggagcaaaacacaggcaactaaagggacatctgtgagaagcactcatttttagagcctacatccttttcttttgcatgacataataatgccttcaggaggcagagaactcatgtatgggtgtgacataccttgttttccagagaatcatcattttgtgaaaatgtatcatctgagtgtaattcagggtgggaaatgtgataccagacagatcatatacagatgtagattccagaaaatgctctttcatgtctgtattaaacttagaaatttggattgcttttttaaaacactaaatacctacttaatatcacataaacaaagtggcgtatatttttctcaccaaataagagggatgaagtatttatgaagcagctcagtgatatactagccagcatctttgtcattgtattggccttgatcctcaagtcacaagttatctactatagtgccatgcatcacttttatagttgaggtagggttaatggagatataggattttagctatatgtatcgtatgtatcaggaaagctaatgcagtgtcaggaagtttctgttcatacctctacctcagaactagattatatggccactcttagctgcaagagaggctagtaacatgaatggttaacatttccagcttctttaggaaaggtaggcaaacaagaaaaggaatgagaatgaattctggattggcaaccaacaatattagtcagggatttgagattttgcacggtagattatttgcatctttctacttgtagcttgtctatgactttatttttaaaaagcatcaattacaaaaacgtataggtaggtcttgtttttgtagctagtctcacaatccttgccttttaattgcactgttttacttgtatctaatgtaattatttatatagttgagtttcaatctactatcttgttatttattttctagctggtccctccgttttttgtttctttgttgatccttttcaggctaatcaagtttttgctgctattgttgttttgttctttgcttggattccatttcttctatagcaagcttgtccaacctgtggcccacaggctgcatgaagcccaggatggctttgaatgtggcccaacacaaattcctaaactgtcttaaaacattgagagttttttgtaatttttttttcagctcatcagctattgttagtgttagtgtattttatgtgtggctcaagacaattcttcttcttccattgtggcccaggaaagccaaaagattggacacccttcttctataggcttttaaagtaatttaaaacttaagttgtttaagtttaaacaactctttttgtggttgctctagggattatgtctctttaatttatcagtatctaccattactatgagttaacattattttcatgtgcaatgtaaggttttttcagcagtattatcctacttatatcccttccatcctttgtctattggtgacataagttttactcttacatatgttctaagccccactctacattgtttcaccttttttttcagtcaaagaacgtaaaaaagaaaaaaagagttttttgtatttatctatatatttaccatttccaggacttgttttcctcacctagatattcaggtttccccttggctctatttccatttagtagaaagaaatttctttacaatttcttatagagtgaatctgctggtgataaattctcttaacttgtatttatctgaaaacatctcttttgccttgcccttaatttttaaattttatctatatctttgagttgctatgatttttctcttaaaataatcttaacttagaacagtatgagatttacagaaaagttgcgaaggacatgctgaggacttgagatactggcatacaattcctatttagttatactagaatcaaaaacctaacttgtattaattaatttgcaaaaaatcattctcctcttaggggtaccaattcagtatatttgatccctgttggagaatttcttatgtgcatacatgggttgatctgaatgtgaaatgctgaatttctatttgagtgcatttatcaagtatctaacctaaagattttcaggctcctacaaaagaaatgtggaactacatccattctttaaaggctacattgggtgggggatggaagagtgggtatcagtagggtgcttagttgaggagaaaattttgagatttttctttagaagttaagggttcccaaaggtttgaagtttgagagaaagaggcagaaagagttaaactaggggaagaaaggagtgattcactctgacattggtgttcttgaaaaattcttttcgggtcaggttaaccagtcttcccatcctatgcccacaggaccaaatgtttcacaagtccttcagcaagcaagttcacaaaagaacttggaattccattctgttccttaatctatcactgagaacagggtgagttctttaaatctcaaaccgttctaattttatctaaacttcattagcttgtcttaaaataattcccaaaccaaagaataatagaaagctggctctcatctcatccaacttcctttatgatacaaataaggaacctgagacagagagaaaggatttttcaaggtcattgtcctcataacaatcaaatacatataataataacacatgagccgggcacggtggctcacacctgtaatcccagtactttgggaggccgaggcgggtggatcacctgaggtcgggagttcgagcccagcctgaccaacatggagaaaccccgtctctactaaaaatacaaaattaaccggacgtggtggcgcatgcctgtaatcccagctactcaggaggctgaggcaggagaatctcttgaacccgggaggcagaggttgcagtgagccgagatcgcgccattgcactccatcctgggcaacagagtgagactgtgtctcaaaaataaataaataaaataataataataataataataataataatacatgatactttgtggtcgagctgggacttcaacctgtaggctttgctctcccagtccaggttgcagcacgccaatgacccctttccttcccttacgctccaggggcctcagcatgggtatagtaccctcatccacagtctcagctctacctgagcttcctttgcttttgtaaacagctttattgagatataatttacatatgatccaaagcacttatttttcatttactttttgctgcagcttgaaatctggatcccagatctcaaaatgtcaaatacagaatgagggctataacaaataaaatgattgagggagcccttgacatctcagcgtgcacacccagcggtatatgcacccctatttcacggaagtgacaacccacaaaggcccacatttctaagtttctggccccacatctcttgggaatatttcccgtccatctgcagctcttctcagctttggtgccgcgttttcatcttatcaaagattcatgcaagtgtgtcagactggcacacgtaggctgtcgagtctgatgcccatacacaagggaagactttccaatccttttcctgtcgatgacactcttcctttcccccgtaacacagcatttagaaggaaaattatctgtgagctgtctttggcatgaacagaagaagaaggaactcgtatttatttgttcatccagtaactcttgagcactgcctgagtgctgtggcctgtgctgggcacaggggttacttgtcaggtcaaaacagacagggcccctgacctcgtggacctcatgggaaatgaaccaatagcttcctggatagtagaagctcttttccttcatggaaatctgtaaatggaccttgggtggtaggcggggtattggggctggagaacacagttgtgctccagattggggggtggagagaagaggccacaccagccataatcctccccttcgttcaactcctcaagacccttctgtgatttttcttcaagcctctaagttcaagctggagaatctggaactatatgttggagatctgtgaggtatggcatctagatttactttaaaatctcaaactactatcccatgtcatccgacctgttatgctttggtcttcttagtgcacaattaggaagctgaaactcacagagcggtgatcaaagatactcaaagtgacctgactaagtagtagcacagcgagggccgggtctccaatcacctgcctatctggtccctggagccctccccacctcattggttctgccccagatcttccttttgccaattttgctcctcacaaccaagcaaaccctgacatcctagcttctggctccaatttcttacccggtaagggtcaaatatctgtgaaaatcattctgagaaatgtgccatcattctcagatggcagccttgacatgtcaggacagcctggatccaggcgaggatcaccccagatggaaatgataaacttgggggcacatccaggcgggcccaaaagtggagcaggagcagggatgctggcctctgtgtttcagttcatcaggctgaaggggcagcagggctttggcaggttgaatggcacgagctctagaaacaggacagtgccaatacttttctaggactgcatcggataaactgggacatctgcaatatttcctaagcaaactaggttaccctccccactgctgcggctacccgagggcattgggcagctgggtgacccagaaatggccatctccttgtccagctccatctggaattccagcccctaattccggggcactgacaacctttaggtgaaagcgagctttacaacaccaaatggaatcaagcccatttttggtgtaggatgcctattccaaaacaatagggggaaagaaacatttctcatttaaaaaaaagacagcatcaggaagtgaaatggcaagaaatcttccccatgtactttcacgttttatagtctagagaagcaaaataattgcaggaaagtgtgccatgtttaaaaaaaaaaaaaaagacttgatgtcaagagacattgatttgggtagctaaactgggaaaaattacttcctccctgggcttaactttctcagtggtacaatgaagaggttggcttagttgatctctcagtctttcctgctttgaaagcctatgattatatgcaatctctagttaacaatgccaaaaaacaataatggggacagccgatgtctaatatgctcctccttgaccccaaaagacttgttgattcagtgactgggtgactctgcaatgcagtactaaaggccctaaaggccgggcacagtggctcacgcctgtaatcccagcagtttgggaggccaaggccggcggatcacgaggtcaggagatcgttagccatcctggctaacatggtgaaaccctgtctctactaaaaatacaaaaaattagccaggcgtggtggcatgcacctgtagtcccagctactcgagaggctgaggcaggagaatcacttgaacccaggaggtggagcttgcagtgagccgagatcgtaccactgcactccagcctgggcgacagagtgagactccatcaaaaaaaaaaaaaaagccctaaatagggggatgtagggcaaggacaaggaaggtagtggaggtcagctgctttctctactcccctctaaagacatgcactctttgttcactccttcttccagggcactcagaaccctgtgtgcattcatttgtgtgtgttgtagtattgcaggttctaaactctcaatgatgtaaatgagaagagggaaccaataggcagtgaattctatggtctatcagaaacagagcagtcttggggttggggccaagctcatttactcaaccattcataatgacatggcaccatatttggccagcgcctcaaccttccgaatcctagaccatctgtctaacaccgttaattggctccagagggagatgtgctcagaggacatttcagcacatgcacattgaggatgatgcaaagtttttgtatccagacctctgtgtgaaatcctctgtccttggaggcatagattgaaccacgagtcagtccactgatccacttaggctgaggatataggcaggcctcttaacctgggtcacactttcctttcccagtgtcccagagtagggagtcccctctcaaggagaaatcagcctgcattatcttaccacatccgcagcaacgtaggacttcagggaaacttctaagacaatgcgattctgaaatagcaaatgaggtagtacaaaggacatctttaatgtccattacgaccttgctcttgaactctgtggacatgttaaccctctgggtggagtgggaggagccgtagggttggaatactcctataaagtttaagggaaccatccgatagagactgatgtccaaataaatgctgttgaggatagatgagtctaaaaacctggtgtttgacatttatggtgcagagtcagagaccacagtaactatttcctcatttccaaattcatccaggataaaaggattcttcctaggtcgcataccatgaatacacattaatctggaaaaacctgacttctgagttggtgtgatttcaaaagatcaccatgatggggtttctactgctcactaaccaaatgaccttgggcaagtcatttcccttccgcaaggattagttttatcatcagagagatgagagggtggaaccaaaatattctcttgtggttagcttagagacgccttaggacccttctaagaaaaggaaagaaaagcatctctatctactttattggtaaaatcttttctagtagtggcagtgataaatccaatataaatccagtaatactgaaggacccagcactttgggaggccaaggcgggtggatcacttgaggccaggagttctattccagactggccaacagggcaaaaccccgtctccactaaaaataaaaaaattagccgggtgtggtggtgggtgcctgtaatcccagctacttgggaggctgaggcaggagaatcgcttgaacctgggaggcagaggttgcggtgagccaagaccgtgccgctgcactccagcctgggcagcagagtgaggctccatctcaaaacaaaacaaaacagaacaaaacaaaaacacaaaacactgaaggaaagaggtttaaactgctgacaaaaggcaatttaagttaaagtttccccattcagaagcattttctctctctctctctgtctctctctctctctctgtctctctgtctctctctctctcatagatacacacacacagttttgttaaattaaaaaatgtatatatttttaataaatacaaattcattcacttttttgtgacatttacagtttatttcttcggcaattactagttgtggaacccagcatgatcttttaaccctcaatttcttcatctatcaaatggagatacaaaaactatgtcaaggcaacaaatgaactagaaatgagtacagcatattgggtaggaaattgggtcctggactcgggccacacacatgactgcaggttctcagctctgtgaccttagtgcaattccctcccacctctgtgggctttgatcccaccaccagtaaacaggggcaataagagaacttttccctaatggttgctttgtttgtggtggggtgattcggagccacagctctggggctagccttggaagcattccaagcctcattctgacatttactggttgcagaaccacaggcagcttaattaaccttcttgtgccttggtttctccatccaaaaatgggaatgggaatggtgcttatcttccagggctttcttgagaattaactgagttaatacatctaaagtacttggaacagtgcctggtatgtaggaaacactcaataaataaattgcgtgtgtgtgttgttaagtctaatacagtcaccaagagtcttttaacaaatatcccaacaaaaactacaagtaacaaaacagtgtttctcttgtggatcttacattctgaggagaatgacagacaacacacaaatgaaaaaaataagtatgaagtaggtcaggcagaggaaagtatgatggagaagaaacaaagaaaaccagggaaggggcaaatggagagggaggaaagggtgccccttagatggagtcatctctaaggaggtgaggttttcaataaggagctgaatgaagggagggagtgtgctgtgggcgcatctgctgtgaggcagagggtgcattgatgtaaaggctgcatgcttgaatgtgcttctgctgctaataacgatggtgatgatgataacaataaatcaaaacaatgctttaataaatagtactcagtggatgttcaggacatccatgcaggcacattgactcatcttagcctgtaagttattacagtcagcaggtgttaagattgcaattgcctgtattcaaagagggaataaagaaaaggtggcagggcttcctgctttaaatgctgtctgcctagctagtagccctggtgtagcctcttccagtttcccatcaagtgacctatgaagacagaaagaagaacagctgctcatggactgctgaacatggacaccgtgagttaagctgctatcaggatcttggagaaatttttactaattccaacgtcgttacatctctatcttaaaaatgtaaatcgacaccaaatttgtggaaataatgtgcatgggggtagggttaccatttactgttatctcggagactgtccgtggataagcatagtttccagataactgggcattcatcttctctccaattaatacatttttggccctgcccttcccaactcttccctgcaaactccagaaaataagaaggggatggggtgaagagatgggtggcggcacaatgcatcttggtgggcagagtctccacgcgagtaaaacattttaggtaagggtagagtttggaagagccttgggaacaaatatactgggcattacagctttccttatgtggtttttttaaagaagatctgcaagaaccagttggaggggacaggagaagatcccagcaaggtccagcagaaccagttgtcctggtctgaatttttagccattgtagggtaaagaaaatcgacttaatataggttatgtgaaagagggaagcattgactcattgtgtgtaatgtgttcaagcgcacctggatcaaggtgctccagtgatgcttttctctctttctctctccctccctccctccctctccctcctgtctctctatttgccttaatttcattcttgggaaggcttttcatatgagtagaatacggccatatgaacagaatatggctttccatgtgagtagaataaggctttccatatgagtagaatatggccgccagcaagtcccaacttgcatcatccttacagcttagtatcccagagggaagcaaagcctttccttatatttctagcaaatgttcctgggttctggttgacctgtcttggattggctcgtatctgaaccggtttcagtgggatggagtactctgattaaccagaccatggtcacgtggttgccaccagggacctggaggagggggagacaatccatctgaaccacctggactgaacagcattcttgtggaaagaggctgatgtgatttaccaatgttagggcttccaggtagatgaaaagctcacatctgttccatctgtgctaggtgatagcaggccaaggaaagggtagaactgacatcaagcaaaggctagtcagcaataaggttggcaaattgagactattttctaaaattctgagagtaatgctagggagagagagagagagagagagagagaagattatagataggaaagacagggaaaagactaaaattaaacctgtttctaaagaaaatctacaatttttgaggtgtcctaatcaaagatgcagacaaatcaccttccctgagcttccctggggtccaagttaaaagggtgctattcattacagaaaaaacgtaagtaaaaagatccatgcgtgaagcaccttgccaaatgaacagcatacacgagcaaagaaaaaaatgtaagtatctagatgtttaaggtaatttaaaaattattgtatagtcagatgaataaaattaggttggccttcgtctttggtctggtatcaaggaccagagacagtggggaagcgcctgacttttctgagtgctcgtgagccaggaacctcttgccaagacaaagtatctcacgtatagtgacaacatgaagtcattcttggatatatacagtcttggaaactagcagatttgaagttctagccagccaaagataactgaagttagaaatgcgagtggatgttttgcttataagaactggctgcattccttgaggtgagagtcagattcccccatctgggagcctgcaggagaaacatctgcgcagtaactctcccagggtgatcggcctctccacgggatgtggaggcgtggctttcctgtcccagtggcatccagaagaagcttaaaagggagggatttcaaaatgcattacccttctttattggcttgactctgtaactgaacataagacattcctttggaaaagcttcttcttcagagaagtacaggccaaaagagacaacaaacagcatttctcacctgcttcctctcagtgggaacgtttgctaaatgcttaatgtaagttctcacaggtaaatttcaccactgaattctgaagtccaattaaataggatttacagctatgtctagagaaaaaaatgcaaagcctgctttgtttttgagaggtatgtctgtgggtgatttctccctcccttcagttttctattcttatttttaatgactttttgaatgaaaaaaataaaaacaatgcacagctaaaatagacgagatggcatgcattaaaccaaatgcatggtttggagcaccccatgcatgcactcacaatgaaactccacactccctttgctctctctctcacatacgagctttccctatttcttctcttcttgtctatctttttctctgatccacagctcacatggacagggctctctcaaacacacacacacacacacagcccccttggtcacttcctcctttgcatctccctctctttccagctgcttctttcatacacaaacctctagtcttgctgtcacctctgggtctcctccctctgaccctcccagctctgcacacaaacaggagccttcagtggctgctctcctcactctgtggctctgtgtaccttccattcacagatgctcacactgccggtggagcggaatcacttcctctcttctctgtatccttcagttctcatccatcttactctgtctccctccctccctccccctcggactccccctctctctctaaagcacacacactctccttgattagttgtgcacacttataaccacaggagttatggattcaattatccaagcaccaccatcctcccccacctctcttgaaaagtgaagacaagtgagcgtcctaattaaaatgttacccgtctcattggcgcaaagagacagaagcgccagcgttggggaaaaaaaaaaaatggaaagacaataatgtgtttaccttcctcagctgggtgagtcatccgtgggctttttctggttttatagcagctctctgctaccctgcgtaccatagactggggacaacttgctttctgtccgtccttatgggtaaaattatgaattcttcatctggacacttaagaataaacatgcactgtaatcagagttggcctgaatccatgggctcccaaaacttttgaaaacgctcctttgttctttgtcagtcgtaaaataaacacaccgctgatgtgtcccacatcccatgatacgggaaggacgtgggccatatttgatgaaagggagagaaccgtgagcctgtctccctttcgcaggctcaggtttgctttctgtctccttttgtgcagactaggctccatggaaattcagctgggagccacctcctgcaggtttccaggcctttaaattcaagtggatagattatgcccatgccggggttggggagcatctagatgatcagatctgttgtgaacccactctcattgctttaggaaacaattccaataaattagtggggggttttgacagagcaacccgtcatgtgatattccactggaagcctgccgaacccctggctccaaagcttgcagggatgtttggtgtcattgtctctcgggtggtggtagaagtcaaactgccagtgcggcatctagagaagtctgtgtccagatgagatggtgatccaggagcctgcagagcagcgggggcctccctgtgcggtggctgccagggggtgacctgccttttggtgtgcatgccacatctttatcactgtgacaagaacacagcagcaatgacttcctcatggtgtggcttgaggagctgggactgatcgtgcattataaggaatatttaggccccactctgtaatgttcagagtggcacagaggtgggtttctctggtccatgtggagagggaacctgccagagccagcgggttgagagtgtggaactataagaaatagacttttggtctttgtccctggttcctgacacggaactcctaaatccttggaattttctgagtgataggagcccttagatagctccagcgtggggcagttgccagaaaggcaaagtcttgattacaggcctggaacttttaccaccccctgcagcctccagggacaggacaggagctggagcttgagttaataatccatcaggctaatctgttgaaaactctatgttcttcttcttcttcttcttttttatttatttttatttttattttgagatggagtctcactctgtcgcccaggctggagtgcagtggtgtgattttggctcactgcaatctccgcctcccgaggtcaagtgattctcatgcctcagcctcccaagtagctgggattacagatgcatgccaccattcccggctaatttttgtatttttagtagagatggggtttcaccatgttggccaggctggtctcaaactcctgacctcaggtggctgggcatggtggctcatgcctgtagtcccagcactttaggaggccaaggagggtggatcacctgaggtcatgaaaactctacaaaaacccctaaacaatggagggtggtattcagagagcttctggtctggagagcatgtggaggcgctgtgaggatggtacattggcaattaagtttctaccaccatccagagagggcacagaagctccgtgctccccactctccatacattgccctgtgcatctattccatctggctgttcctgggttttctcctttatgataaactggcaacagtcagtaaagtgtgttcctgagttctgtgagccattccagaaattactgagcatgaagatgggggtcatggaaatcccctgtttatagccagttcgttcaaagtgcaggaggcctgacaactgcaaccagagtcccaagaagggagcagtctcttgggactgagcctgtaagtgctgaggtttgccctaactctaggtagtaaatatcagaattgaattgaattcttgaacacccagctggtgtttgaaaggttggagaactggttgatgtaaggaaaaaaaaaattcacccagttggtgtcagaagcgttgtgagtaaaaacagctttttgagagtgcttgagaaacaagcccctggacctgaaaatcactgtctgcattcgactcacaggtggccatctctcatgaacttgggcatgcagggagcagggcccctaacaggatactggtggctgcaacacaacttatctagctctgccctccaggagagcgctagacatgcatgtccaggttttaggtttgatgccaaagccaggctggagtcctggccacaatggcctctccctgaagatgtgggatgcctatcggggggagggagactgccacatgatgccaacatcacctgtgacaagacactagcatgctcccctggaagccctgccttcggatcagaaagcatcatttcagcccctggtgctctgagaaggtgtggatggaatactggccttggcacagctgcctgtaggatctttaaactgtggacacctggaattcagccccacggaagaccctctgcagtatcatgtagcttgtcccactggagggtgtgttatagggccacccattcccatccccgtggtgcatgatttgccaggcacttctggcttgcacctgcacgaggctgggcaaaacccagagacactgaggcagagatacctgagacacttgatgtgggaggctggcaacttattcagtggctattgacaggtggcacttcaacatcttttcgtaggacacgtggaagaatgtgccctttgcttcttagaaacaatgacagttttataactcagggatacagaggtgaatacagagctttctcctgtcacaaagatactcgcaacccatagccttggcggttgcacagatctgcccagctctctgctggaagacttatcccatatcgcaggcctctatttagatgctcgctgcttcctttgggttctattccagagccttgcaagtgccagccatattgggtcactgacaaatgaatatgggtgaatgagcagaggagcttgagtcaatgcgtgaacatgctccttctccaggcttacacgtgaggacatgaccctgagcagggaagccgtgctgctataggtgatctcaaggcccaaggcctccaaaggcaggaagagaggaatgaatttctgattggacagaaactgaggcaccagcacagcctttccctggccacccctgagaatcattgttcaattaaagttcctcttgagtagtgcagaatccatggatctctttttccttggctcctcaagccccatgaaaagggctcttgtggcaaaaacctagtgtttgaatgaacttccctcccaaggaaactggaatattttcccacgaattatcaggagcccgaggttccagcgaacatggaggaaagaaaggcagacttgagttccttctctggtgccactactcattggccgggtgaccttgggcataccatggaacctgtctgagcctcattttcctcatttgtagaatggtggttgcaataaagtttatttcataacacgcttagtggttcaaatgacatatgcgagttatgccttacaaaaccacaaagtgggccaggcgtggtggctcacacctgtagtcccagcactttgggaggccaaggcaggtggattgtttgaggtcaggagtttgagatcagcctggctaaaacatggtgaaaccccgtctctacttaaaaaaaaaaaaaatccaaaaactagctgggcatggtggtgcatgcctgtagtcccagctattcgggaggctgaggcaggagaattgcttcaacctgggaggtggaggttgcagtgagctgagatcgtgccactgcctgtgtgacagagcaagactcactctctcaaaaaagaaataatagtaataataataataatctcaaagtgctatgaaatgttagctaagtccataagtttgtttattttatggctctgatctttatagacacttttgtcagaatagtcttaatgtgggtatggggtaaaggaggggtgctgggagcttaaaggggaacgtggtaagctattatgggggcagagagagaagagagggtgggcatgcagaggtttagatgcttatggaatcaacatggcccatgatggacccttccccagagaccccaatattgggctcatggggcacctcctgctgcagctcctcacctgccgcccctggctgtccacactcactctgaccctgtgacaaagcttctcaacgtcacacgcctggggcttgcgaaggcagatgaggagggggcagggaagaagtcatagtgctcccttctctcctcccctctaacagtgattggacagaaactgagccaccagcaaagcctttccctggccacctctgagaaacatcgtgcaattaaaggcctgacagttgccatctgtcctgtccttctccagtcgcccagggcgcagggatttggagccggcacattgtgatactctacagtgctctgtcacctctgatttcttccagaaagtcattaagcagacctgtgtgggagctgccccagcgtccgaaaactccctccagggcaggcagcacagaggtggtgagaacacactaggattcctcaagttcaaggaagttggcatctgtgtgagatgagatgaggagagtgcaaagtcagacaaggaggagtgggatgtagacccaaatggactcatttcctctttcttctttggcccctttgatctaagatggagccctacatcttccttaggaccccagaaccacaggcagtgtagaatgtgccttattttaggttttcccaacagcagagtctgagacaagaatttggctgcaggtagtttatatgggagaggatccagggggcagaagtgagagagtgggcaaaacgcaaatggttgggaggaaaagccagtcgtgcgatacatgaatgagctgattatcgctgtgggcatctggaattcagccccacagaagaccctctgcagtaccatgtagcatgtcccactggagggtgtgttatagggccacccattcccatccccctggtgcatgatttgccatgcacttcgggcttgcacctgcacgaggctgggcaaaactcagagacactgaggcagagatacctgagacacttgatgtgggaggctggcaacttacacagatagcggtgcaggggatgtgacgtggatgatttggattagctacaaagaggcagagttcttggaaagtggggcttcttcatgtaagcacaaaaaggcagggactcctttttcctgtctgacagacttgtctttttctttgagaatcagcttataggttacctgctccaagatggctttgcttggccaggtgcactaagatccttctcatgacctggctctaggagagtccatgtcacagtcccctctcactgtttgcctgtcttcaccatcagacctgagtctctagaggacaaggagacatagctgcttcctttttgtttcctgagcacctagaaaaccacccgatgtgtaataattattagtcaaatgattattttttcattcctgcatttggcaacgctactacagaagatgtgttacttgttaccactgtggctgattgagcaggggctagcaaactctgacctttaggaagtcttggaagaagagtggtagagggcatgtgtatcaatcaggggccattgcaatagcccaagaagtgattgaggcctggaaccagggtgtaggaggaacaatgtagaaaaacacattgtcaggggagaatcagctggactcagcatctgatttggatgaggtctttagcagtgggtaaagcacacagcaacctcatgttcagcagctgcacacagactagataggagtttggcatgcatctgctttgaagatgttgggagcactctcctctctcccctctacccacttacataacaatttgagcttctagccccaaagtgatagtccaaggagcgactactagtgaaagccacctagaatttgtatcctagagccacatcctgctaagcaagtcctcttcataccagaagccttttttgtttatttttttgtttgtttgttttttgagatggagtctcgctctgtcacccaggctggagtgcagtggcatgatctcggctcactgcaacctctgcctccagggttcaagcagttctcctgcctcagcctcctgagtagctgggactacaggcatgcgccaccacacccagctaatttttgtattttttttttttttagtagagatggggtttcaccgtgttggccaggatggtctcaatctcttgacctcatgatctgcccgccttggtcctcagcctcccaaagtgctggcattacaggcgtgagccactacacccggccaccagaagacttttaacaaaagatttatctgtcttttcattggccatcctgtgattcacagctcaaggtgactttgaattttgctgttaatcttgcttcctcacagattactactgaaactgcaaagatacatgaaaaagatgttgcactgcttaaattgttgaaaagctgggaaaaacctaaatgtacaacagtgggggattactgaactaattaaattatgtgcataaaattgcaaacattcttatatatttactgtatacataatgtttaaaatatggaaaaacaaggagtgttctatgtgcccagcaacagagagttcattgaaaaaaaaaaatccaaaatgtgtgtagtacattcatataatgcagcataccagcatggcacatgtatacatatgtaacaaacctgcacattgtgcacatgtaccctagaacttaaagtatgattaaaaaaaaaaaaaaagaaaaccacgaggccactaaattgcccctggcctgttatatgtgatgttgtcaacttgtctttgttgatatgaagctctgttcataatatactaaatgaaattaacaaattaaaaattagtatacacaccctggtcaaattgttttcattataattatttaaacatgagcgaaagatctgaaatagtaatctccaggctttactgtggttatttcaaagtggtagaattatgagggattcactacaccccccctcctttttggtctgttatttttaaatttttctacaagaaacgtgtttcatttgcatatagaataacaagaaatcgttttttgagggataactgtggaaattagcaggactctagatgtttaaacagtatgatttaggaatattctgctcacctgaagtaagacataaaagcataaaagctgcctcgacatgccacatttagaaagactggcagcaacagctctattgcttccttcttctatcttgcagcagaagtgtgactacaggaattaagggttcatgtgtaaatgaggtgaagccagaaaatttcagcctgtgggagcccaggggaggattcccttttgatatttggtagccgtgaagaaagagcagctctgatctggtagtgtggacctgcgacccagactccaaggcttctgagggtgaaggaagtagagaaagactctcgaatagaagctcagctagaaggaagaccaagacttgctagaaaagaaccaggtattcaagaattggtactaaaggaggaccctagatgacccagcagagaaagaaaggaaccacttgttaaaagctaattaccattgtgattttgccaagctgcttaagcaatgaaactggctacctgttttttgccttcctgtatgttattccccctaccatttcaaaagttgagagcacatgaattctcagtgatcctataaatataaccatgtaagcttgagcaccaatgaactgaatatgggtgctctggggaatttgagaaatgtattagttatctgtcactatgtaacagactatcccccaaattaatgaattaagacaaccacactttattatttcttgcaattctgagggtggcctagatgattcttctgcaggtcttgcctgagctcatgcctgtggttgcatttagctgtggggacagctggggctgggctcatctggaccctggaaggcagggcttctctcccatggtcctcatcatgcagcaggctaggctaagcttcctaagtgttccaagaggtttaaagcagaagcttccaggcccaggaatgcctggtcccagacttgctacagcattgcttctgctccattctgttggcccaagcaagtcacaagactaccctgaatttaatgggagagaaaccagacttcacctcttgatggagtggccatgtgcttgtacagagggatgggagggattactggcaatcatctttgcagacagtctggcccaggaaggatccagctatattcacagctcagagtctgctgcatcacctccactccaaagagatgactccccaattacaggaaggctacctaacaaggctgggatcacagacagtttcttgaagcactgaactagaatagtggacactgcagtgacacatggaaggagaaacctagtgaccgtatgttccaagcagttcccagaggtacaagaaaggaagacaagaaaggatacagattggatctgggagggagaaagctacaaaggctggggcctgtggagccctgctggttagctgcaggtctggaggtgaccctcagccaagcaggaagcagccccaagactcctttcctgtttctcatgtggataataattgacgaatgttggcaccaatcctgccccaccttctgaagaaaagttctgttggtcaatctctggctgagatgcacccactctcatattggttacagggatgggagcatcttctgggggacccaggattgagtttgtctcacgactcacagttccaccattctacagtgttaatgcaacagcaacaataaaaatgacaaggatcatggcagcagttacgggccttgtactcactgattatcctctaaacaaccctgtaaaataggaatcccattctttctctctctctcttttttttttttttttttttttttgagacagaatcctgctctgttgtccaggatggagtgcagtggcatgatactggctcactgcaacctctgcctcccagattcaagtgattctcttgcctcagcctcctgagttggtgggattactggtgtgcactaccatgcctggctaatttttgtatttttattagacacggggtttcgccatgttggccaggctggtcttgaactcctggcctcaagtgatctcccgcctcagcctcccaaagtgccgggattacaggtgtgagccaccgcgcctgcccaggaatcccattctctaagtgagagaagagaggctcagaggagctcattgatctgcccaaggtggagctggagctgcaattttaatgccaacagcctggctgcagggtgctcttgcccaccaccctgccaacaccaagctcatttttctccttgatgttatgatatcagtgctgttgcccatagactgcactttgatgtcatttataacagattatcaggaggaagactgtatatttagctactgattaattttacacagtttccttccaacatggagttttcctctgaacagtgggagaagaggtgtctggggccagcccagagatgacagccctctgcagcccaccctctctgcacctccccatcctcccagaggccaatgtgcatggccagtctatcttgtctctctggcaaactttcctctggcctcttgaatgacttctctgccagtatctctgctgaaatggagcggggtgatgggggagaagcctccgcccactttgctctttccttgcagatcccagatcccccagaggacccagagaggtgaaggtgtctaacataaaagtgagatccatggagctgcagcctaaaaccacataaatattaaatcacccaagagccaaagccctctgggaggggcagtctgtgagcagggagaaggaagaaacatccattacctagcagcagacaacctgaggggaggtggcaggcagagggaggcaggagagagggcgtgttggaggctggggctgcagccagaccaggcccaagctgggacggtggagatatggagagaaggcacagggactcttcccatcagtctaggggagccagaccctgcaaagggtcttcgtgagctcccaaaggggtgaaaaaacacatcttatgataaaaggatagtaagaggataaagatgttcccaaatgcactgataaagtttttaaacctcatttcccattagcagagcagtaacaaccttctagcagtgggtacagttgtaggattgtcccaaaataaacaaccaacccctccttttgcatagcaagagatatattcactgcacaaatatttctagaagggtgattctgtgcagaagtgggcatttctgtccatgaacaccacaggcaaggtcctcatactaagaagttcaacttgtcagaagtaggggcagagacagtcctgttgtgatgttggttctgagatatccttacccacttcctgtggatttttcaagctgtgtgaattgcacatttctccagatacagaatcagggacagtttggactgggaggggaccttgggacttcttgttcaagcctctcatttcacagatgaggaggttaacatacccacacccaccagtgcatgcggcagaaagtggaaacacagggactgacttggggtggtggcttgtgaaagagcctgaagatacacacagctggaactcctaattctcattccagttccttctttccccctataagttatatgtgattttagctctgagacaaattaataatttatttaggatagtaactgaaaattgtgcattatttcagtgttagcctctggaggaaggagagaagagctgccaactcaacccagggtaagcttctcagttaatttccctggtcctcttttagaggagagaaactgatgtcatcggtttaattccagggcactttattagcccatgttcacaaggatcagtggcttaccttgagtgctttcaggaagcagagcctgaaacaaaggcttgtgtagggtagtttatttgggggtgtgataccagtgagtggagaactgagaaagtgtaccaggaaggagaggaagacagtccaaaggctattgagctggttacaaccatggaacacgggatctcaatcctgctgggaacatgtgaaggtaccctgacgttgtctgcctgggatgctgaactggggggcgttgatcccctgagtcccctaccctttggatgggaggtggttaaatccatcactccagattagcctatgtgatggaatggcggagcaggctccacagcagagcaaaaagctgcagggcagaaagcaccaggtgcagctgagaggtgagttgctctccagatacacctatatggagtcatccagctgctatagtcatgtccaaagcaaaaatgaaggacaagaggatgtgagatggagcataaaaagtgatcagtacactcatgcattagaagagtattgcttccattttgcagacagggtttcaccatgttggccaggctcgcctcgaactcctgacttcaagtggtccacccatcttggcctctcaaagtgctgggattacaagcatgagccactgcacctggcctatcatctgtctttttttattatagtcatcctagtgggcgtaaagtggtgtcttatagtggttttggtttgcattttcctgatggctaatgacattaggcatctcttcacatgcttatttgtccatttgtgtatcttatttggagaaacgtctatttaaatctttcatctattttttatttgggctgtcatttgatttttgagttgaaagagattttatgtaatctggatacaagtcctttatcacatatagaatttgtaaatattttccttcgttctgtaagttgtcttttaacttttctgatggtgtcctttgaaacaaaaacgtttaaaaatatgatgaaatacattttatgtattttttcttttgttacttgtgcttttggtgttgtatctaagaagtctttgcctactactccaagctcactaagatttactcctatatcttattcaaagagtttatatttttagcttttatattttgatttatgagtcagcttcattattttgcatgtggatatccagtcataccaccaccgtttatgaaaaagagtgttttgtctcttattgtcagaaatcaatggccgtaaatgtaagggtttatttctggactctcttgcctatttcattaatctataggtttatcttttcaaaatgttttaattagcatgtaataattgtacatatttgtggggtacagagtgatatttcaatacctgtatacgacgtgtctaatgatcaaatcagggtaattagcatatctgtccactcaaacatttaatatttatttgcattgggaaccgttaaaatctcttctagtcatttgaaaatatataataaattattgttaattatattcaccctgtagttctatagaacgctagaaattattcctcctatctagctgtaatttcatatccattaaccagcctctccttattccccctctttccgacctttcctaccatgtaataaccacagttctattctctacttctatgagctcaactatttagctcccacatatgagtgagaatatgcagtatttagttttctgacctgcgttatttcacttaacataatatcctccattcttatccatgttgccctgaataacaggaattcattctttttttatggctaaatagtatttcatttgaatgaatgaatgttgtatataccacattttatttatccattcatctgctgatagacatctagtttgattctgtatcttggctattgtgagtagtgctgcaataaacatgagggtgtagatatctcctcaacataacaatttcctttccattggataaatacccagtagtgggattgctgagtcatacgataattctacttttagatctgtctttgctacactatcttatttaatttagctcataataacttttgaaattggaaagtattagtcttgtaactttattcttttacttgaaattgtgttgactattttgtatttttttgccttatcacatgcatttcatatgcaatttcttaagaaaaaacaactgacattttgatagggattgtgtagtagctgtaaatcaatttggggaattttgctatcttaacaatattgtcttccaatccatgaacgtgggatgtctttccatttatttagatcttctttaatttctttctgcaatgtttatagttttcagggtacagatcttacacctctttaaatttattactagatattttatttctgatgctattatagacttgacttattaatttcattttcagtttgttgattgctattaaatagaagtagaactgatttttgtgtcttgatcttgtatcctgaaacttgctaaaatcatttactagttctagtaggttcttttagtagattccttaggattttctatataaaagattatgtcatctgtgaatacagatagtttctctctttctttccaatttgcttatcttttacttcttttacttgtctaagtgtcacagctagcacctccagtacaataaaagttgtgagcgaacatagttgtcttgtttctcatcctgggagaaagcattcagttttttaccattaaataaatgttagctatggatttttcatagatgctctttgcaagatgaggatgttcccatctgtctctagtttgtggagtgttttcatcatgaaagggtgttggattttgtcaggtgctttttctgcatcttttgagataatcatatgggttttttgttgttcaagaaaagacaaaacttaaaaaaggaaaaatttattaatatggtacattacattattttcagatgttaaaccaaccttgaattttggggtaaattctacttggttatggtgtatatgttacaggatttggttttgctagtactctgctaagattatctgcatctgtagttataagtgtctaagaacttttgcctctctgaaattgtttctagatctaaagaaccattttaagtgaactctcagagatttcagaggtaggtgattgcctgaagaatagttttactttgaaaatttgaatctgtttgagaaaattataaattctaaataataaagcaaatccatcagtctttcctgagacagaatcatctgggatcaatcagtacatgagtatttctggagatacttaaaggaaattgaaaataatttatcccaataatatatcattctatgtttatcttttgttgtcttgaataatattattttgttatgttgaaataattgtcactcatgctcacttgagttgcatttgatatcttgaatagaaatgtttatctgagactcaatgatatactcaacaaactgatgatgacatattcatgaaatacccacatgatatgtgtcctatgatattcaataatatactcatcatatagtcagtctactgatgatattctcctgaatacttacttgatatgtatcatttgatgtaatgaattgttctttgaaggacaatggcatctttccattgcatgacttttataggcacagtatcatgtttgcggagttgagtctgtagcttaagtcatgctatgtagctgcaaagttcctgttgatgaacatacagagtttggatggtgatgattcatcttccatgcacaaatgttcacaggaaaggtaggaagatggaaacttaactgaaggtaagaggttgtggttggaactagagttgggcatcattttttgagggaaaaaaaaaaaggatatccacaaagaagcctgagcctagaaggatatctacattgacaagaggaaaagaaacaacaacaacagcagcagcacaagtgattaaacgggagcagtcagaagtgggagaagaaccaggggagtagaaaagaccagggtggtcaacagagagaaacaatggaaaaggctaaatatgtgagaatcattctctagattacaggatagtaagtcacctggtaactttagagagaaccttttcaattatacctttgatagagaacttaatatatatcagaacctataatacatatttcacatgtattatcttattaatacttaacattatgagctagatattatttgcatctcacagatgaggaaacggtggcttagaagtattaagcaacttgcctaaggtcaaatagaaagtcaattgcaagctggatttcaaatgcaacctcactataaaggagaaaggaggagagagcaggtgacgaagaaaacaaaagcagtgtgggtaggcacatgagagacccagaacctacctacgaacaaggaagtgtcagagaaggaagcttggaagctgtatctaggggtgagagtggtgcccttttctctgggagccctgctgaggtgacagctgaggtcactcagagctgcatctggcctggtgcttatgggttgtcccacgtaacccactctgcttctctttcatgcgctgactttctgtacaaagaaagatccttggggatgtatgaaactgaaacacagagttatgttctgagagtgaacaggattgtttttggactgccagagttaattggtcatccataagaagatgcaaaattctattttgtttacagaatatagtggcttggcaaagcataatggcatcaacagaaatatgtcctagctgaatcaaccagccttgtgtcctccatatgttgagagtacatatggtgaaactgcatttaattgggccccattgctttgaaatttgtgaaggtctggtcaggagctcagctgaagcttagctttgctctatttatgggaccaaaaagagttggtaagttatttgtttatgtaaacagggatcagtgtgttctatcttcttaagaacatacatgattctcaaaaactgaacaatagccatgcacctgcagatcgtgagtgatgtcaactataaatgattttttgcctcttgttaaagcaggctttaaagactttcttggcaattcttgatgagctaacggcacttgtcaccctctatatttaaaagaattaaataattatttaatgcaataatttagtaattatttgatagttataaaataatttaataattatagaaccatctttaaaaatattctatgatcccaataggcctcctcaatcttggtctgagttagtgagtgaagttttattccttttattctattggtcctcagcagtgtctaccctgagttttttctttctttcttcttcccttttttcctctttcttttccttcataagaaacaagttcatttggggcctatatttaacagtctacccaatctgtatattttaacactcgagatcctaagtagtaaaatggaataatatttcatgtttgtatcaagattgctcactttcaaaccacataattatcttgtgaagcatttatattcttcccactgataggaagagttgagcaaacatagaaacaagtatcagaacagaaatcatgaaacttggccattcttttgcttctcctactcatctggctgtgctttcactagtgggggaaaccataggcgtagctcctacagctttgggggattcataaaaaaggagctctgcaccagggtacaaaataagctaaaggttgtgtttggtctgggatcctttggtttaattttatgccactggataaacatgttagtgagattcatttatttgtgccttgcaaagaagtataaaatcttgcctggccataaaaatttggctggagttcccaccacataaatttaccattccatttcgccattgtttctgcccatcatggatccacaacaaaagagggcctgacctcatcccccaaaggtattattttgttcatagtgcagctttcacattgggccagaaagaaactatttatcagctcgtgactcagacctcttaggttaacacccctctcagattctatgatttcagagttggtttgggagtaaatacatcagcctaggattatttgacatcgttttctgtgcttggttagcagaagtccattgagtcaggcttttgtcacccacctacatagtaacaatggaagttatttatggtatggattttatgggtcaacacttttgaagataactgtaaatgccaggactgtgcctccttgggctgtgagttctgtagctgagcagccacagttggggatgggggacgcgtgaatgtgtaagtcagtgctaaagacaaccactttgtttacaaagctccagcactttccaaatgtctgcagtattctacctgtcagtcagctccactatctgctaagtcagataactgatgggaaggaaggaatgaaatgaggcctcttgaaaaagagagattattcagattaagagtttcaaagcaataggttggaaacaggcaaaaatgaatcacgtggagagtcaaaatgaatagaagtggaagattgtgggctcagggttaagcccctgcactgggccttctgttaataaacgttaaggggaaatgcaagacccaagagggacaaaaggagagtgcagaaacatcctctgcttatctggataaatggttcctttcacattttctttgtgggtggctttctgaaagccatagaaaaccatgttctccccacctttttttttgttgaacccgcctcccaggttcaagtgattcccctgcctcagcctccgaagtagctgggattacaggcaggcaccgccatgcccggctaatttatttatttatttatttatttatttttttttttttttgagacggagtctcgctctgtcgcccaggctggagtgcagtggcgcgatctcggctcactgcaagctccgcctcccgggttcacgccattctcctgcctcagcctcccgagtagctgggactacaggcgcctgccaccacgcccggctaatttttttgtcattttagtagagacggggtttcaccgtgttggcaaggatggtctcgatctcctgaccttgtgatccacccacctcagactcccaaagtgctgagattacaggcatgggccaccgtgcccagccgaggacccatttaagggtcagcttatgaagaaaccaaaccaagagcctcatcagatatctaatcaaacatcatatctagttgattccttctctttacatctcagttctatcccctcttccctcagtccactgtcaatcatctctcactggaccattaactattctgcttactatttttctgccttttatcttacctttatctttatttaattattgtagagtgatcagagcattttttctagtatataaatctggtcatgccattccctcactcaaaattccttactagtttcatactggccaaaagattaaaaactccatagcatggcataaaatcattctactatgaagacacatgcacacatatgtttattgcagcactgtttacaatagcgaagacttggaaccaacccaaatgcccatcagttatagactggataaagaaaatgtggcacatatacaccatggaatactatgcagccataaaaaagaatgagttcatgtccttgcagagacatggatgaagctggaaaccatcattctcagcaagctaacacaggaacagaaaaccaaatgccacatgttctcactcataagtgggagttgaacaatgagaatgcatggacacagggaggggaacatcacacactggggcctgttggggggtggggaacaaggggaaggagagcattaagagaaatgtgtaaggcatgcggggcttaatacctagatgatggtttcataggtgcagcaaaccatcatggcacatgtatacctgtgtaacaaacctgcacattctgcacatgtatcccagaacttaaagtaaaataaataaacaaaaaatactatcccgtctttatctcctgtcatgcctacctgaatatccaattacctagtcatgtatggttctctgaaaacaattatctacatattgttacatgcttttccattttcctttaatatccagtcatcaaagtacctacctagtaaaaattctactcatctttcaagtttcaactcaagcattacctcctctgtgttgcctaccctgatcctcccaacaaattctattttgttgcttctattatttcttaatcatgtattcattacagcagtgatcacatttcattacagttgttttgtttgcacatctctatttgtattagtctgtgagatccgtgagaaaagaaactatgtttactcttttctgcaccttcatcctctggcataggccctaagcacatatttgtagctcaagggatgctttttgaatgaagaaagcattttaggaagtcaggaatggcaccgtcaaatgaaagagggggatgaaagaggtgtgttctgtggttacagaacaaagccatactgcaacaatatatactataaggaaccaatgatgacctataggtttttgaacatagtatggtggtgctattgggatgggcagtggggagaaagtaggtaagtatggaaaagacataggttttaggagaaggataactttaaatttttggtgagatattggtatggagatatgcctcaagatgttggacacgtagggacagaacaagtgcacaaaatcagagcttgagaagtggatttgaaaaggacctacctggaggtgaaggtgggacccatgagaacagagtacattaataagggaaggaggagagagagggtaggtaaacattaaagaaaagagcctttatggaatatgtaattttacatggtgggaaaaagcaaaggaatcccatgaaggagagagatcttctggaaaggcaagcataaaatggagatagtgttcatattgagaaatcaaaggaggaaaaaaaaaaccctgaacaatatgaagatggttaacagctgcaaatacaagaggacaagtagattaaggaccaaagaaaaattgttgcgtttggtaattaggcagtcactagtgcttaaaagctgaattattgcagaagcagaaatattatttattagtgacttcaagtggactgcaagatgggaaaaataggggtggtgagctaccatgtgcttttacagtgtgagctttcagcagtggagtaagtcttgctgctaatcatacccacagggtaatggttgggggagcagcactgaagttgaagttggggcgattggggaaccaagagaccagagcaccaacgttccagcgatgaaggcaaaagaaaagctgtctccctggggctgagcatgatggagagagggttggtgcgccttgtgcatgtagggttgaaacagtagggtgggctgatgtaggtcaaacagtggttcctacagctactttctccgttgcaaacagaatggccccccttttattggagtggtctttctaaaaagcagttctgaccatttcccaaccaatactaactatttgggggagaaacaaattccatatatttgcattcttctataaacagtggacagttcttaatcacttgatccgcactgctcatgatgttcaaattatgattgccttccaccctaacctttatctttgccaaactgaaaggcactatcctcatgtttccatttccatatggcagcccccaacctccattttaccacttttcatgtttctttcaagttacatcttccttctttatatgtggtagccagggtcatgcagaatgttacagctgccggtgcataatagtcataaaaaaggagaacacgggccgggcacggtggcttacacctgtaatcccaacacttagggaggccgaggctggcggatcacgaggtcaggagttcgaggccagcctggccaagatggtgaaaccccgtctctactaaaaattcaaaaattagctgggtgtggtggtgcgcacatgtagtcccagctactcgggaggctgaggcaaaagaatcgcgtgaacccaggaggcagaggttgcagtgagccgagatcacgccaccgcactccagcctggcaacagagcaagactccgtctaaaaaaaaaaaaaaaagggtgaggcggggggtcctcaaccagtgtaacaataaactaacttcatagcttaagctactgttggtcccttcaaccaacagataaggcaaatgctctgattggaggatgcataaattgagcccagtgtggctcacccccagctctagaaaaaccctgggaacaggtctgcccgtagccacaaggaccctcgcatcatcatggatgtgtgtgctcagaggacactgtgataaacaggaagaaaagatgctttgaggaaagggaaggttaatttatctgttcataatttagattttaatgttgctgtgaaatggaagacatcattcctgcctcctgggactaaatgctggaagaagacatctgtttacagaattgtcctgggcgtgctgtataaattcatgtttaaataataatttcaggcgaactgtgaggaagacagggaaaaggaacaggccccaatatgtctttctttcctaagagaaccccctactccaggggtttcccgacttcagcactgtggcattttaggctggataaatctttggggaaggggaggctgttcttgtgcattttcagatgtttatcagtatccctgacctccacccagggcatcatccaccctagcccctagttgtgacaaatgaaaatgtctccggacattgaaaaatatcctctgttggggcaaaatcactcccagtatagcactgctgctctgcactaaagtttctcaaatgttgatgtgcacaggaatcatctggggaccttgttcaaatgcgaattcggattcagtaggcccagggtggggcctgagagtttgcctttccagaaaactctctagttgtgcccattgctgctgctccaaggagcacattctgggtagctgggttttgacactgcctgccttttctcccttctacacactctgccaccacacaggatggaggccggatgatggcagggatgctaccagggcctcccgttgtatcaacatggacatccaccaagcagggaccctccgacctcatgttccattctccacattctcagttggaggggcatagagcagttgggagtaaattaatgagacgcatctcaacctcattgttaatgcctccaaggtcacgaagaaagccctgggcatctagagattggagaggctgggaggagctcacacatcagccaaggcagctgtgactcagtccactgggtgcagttcagagggtacagcagctaatgggaccagatggtctgtgccttgtttgtgggcacgtgcctcccccaccccctatcctcagtcagtgatttccttatttgttccttccctccagaaacagaatagccatttttaaatgaaatgtgacggaaggctctctttcttcccagtctgtgttccattgagctttagatgtccctatgtggaatcatggaactttctttaaaggtcctagcagccacctgtatttggaagccaagtaaggtcgtgatttggagcaaaatgaaaatatatgtacctctactccaacaccttaaattgggattcttaggcagggcattatctcccaataaatgcaggtaattactggaggtgtcatgtattagcactttactattcacatgagagtgaagccctttattaaaaccacctcagagaggccaactgagagcactttattccaggcttctgcaacctaaacttgagtgagtggacagagccaatgggctatttgcaggtccatctatcctcagccccgaagtaactgagcagggcttaagtttgttatcctgagaagctgttccatcaaactgaagtcgtattccgaaaactgtcccctcgtggtatcacatgctacttccttgagaatcctccctttaccttgtacataggtctccattgtttcctcacttgtacttttttctttatctagcagaaccatttgacgattgggtcctgatgggaaaaaaatacaatttacttggttcaagagattatgggaataaatgaaggatgtggtttctagaaaccagccaggtgggaagccattaccacccccaggcctgatggaaggacaaggggaggtcatagcatttccagagctcagttagagctcaagccatggcagaacaaaacaactgccaaaaatatatcaaataaagataaaacacactgatctctgcttttcttcattcttcagttacctacaggtaccttctattgggagaactcaattgaaaactggctggaaagggaacggatgagcttgaatccacatcggccagcctcttggggtccccatctgggatagaaaggcagatggtgggtctgatgagttagacagaagggggaatgccgagaatcatcaacagataatccttttattcccatgataatctgcctaatgattaagacaccctgccatttgcacttaatagcaaagaacatctgagatcaaaacacagatatacaataaaccatgtagatcaaggaccaacatggcggatgagaccaaaatggctaatgccatctgttggtagtaggcagaaagaatggtccaaatctgccttgtaataagattcttaggtgatctgtgtgtttaccaaagtgtgagaggcactggtgcaaagttagttgtatgtagagaagtttctgtacaaagataagaccagcaaatgaggcatgcattgtagaattagcttaatgagcaaaccattgacaatttcccatcttccctgttgatgcaaactccactgtcagtgtgcttagagaaccaagcaccagtccaggcaatccacaaagcataagttagaagcagcatgcaggctgcccaaaccctggctccactggcctatgtgaaggcagctgccttcaggtagtcccctccagagactctccattggtctctctcacttgcatgaaaccaggtcccagagctgctgtttagcagatgcaattactctctccccagtcacagcaaaatagttccctctacgcactttggctggaacatcttatttaaagttcacacccaaggagatgagggtgttaatgactaatttcctctaaatgagcccaagaactgggaagcctcctcccttgactgacagctgtggaggagtcacactccatctgcttggcctctgctggccctaatgctgtgtctgggtggaggaccactgtgggtgagccgccaacaggacagcatctctcctgtcattcagctgtgtggcacaccagccctcccctctataaccaggggcctgtggtatccccttaagttgcacagcaaagtctctgctggctgagttgaggtctgatgttaatatttttcctttcctctaaagccatgtgaggatctacctggtagccaaagaagggcattggcgaggtcaggggtgaacaacccagcactcactcccatttgctgttgctctgctgtcctataagaaacaaagatggcaagattggaaggctgaggcaggcggatcatgaggtcaggagtttgagaccagcctggccaacatcgtgaaatcctgtctgtacttaaaatacaacaacaacaacaacaaaaatagctgggcgtggtggcaggcaccacctgtaatcccagctactagggaggctgaggcaggagaatggcgtgaacccgggaggcggagcttgcagtgagccgagatcccgccactgcactccagcctgggcgacagagcgagactccgtctcaaaaaaaaaaaaaaaaaaaaatgaagaagaagaagaagaagaagcagggaggttgcagggattcagaggcctgtggtggtaagaggaggctgtgccttgtgtaacttctcattttctggaattatgactttttgtcatttaatttctaagttacccctcccatcaaaatgtaccctatttctaaaatagaatatttctaattatgaaaagaatacctgcccattaaggaaactttggaaaacacagaagagtataaaatgactcatattacatcccaaaaaatgcctagagagcaaccgatgtgtctcctcctccccttccccaggtgtatcccctcctttattctacaaagatggaatcacattatggagtaattacaaaccttttgttcacttaacgttatttcatgagaatttcccatggcattaaactgttcttcaaaagatagcatcaagtgactgtgtggcatctaccctttggatgtaacataatttatgcagcctttcctctgttgatcacatttagcttgattctagttttacactattataattaatactggatgataatcgctgcacataaatctactctgtctgtaattatttcccttggatagattgctacaagtcgaattactaagccaaagggtgtgcgtgtttgaagactcttagtatatatcactatattgtcctgaaaagacactgtcccactttatgtcttcttttctgaattgcctgttaatgtccatggcctggtttgtcttcccctaaggaagttcatctcttcttatttggaagagctttttaaatatatgctaaaaatattaacttttaaatttttaattacggtaaaatatacataacataaaatttaccattttatccatttttaagtatacagtttactgatgttaagtatctccacactgttgtgcaaacaatctccagaacttatttatcttttaaaactaacgctctgtgcccattagacaacagctccccattcgcttctccccacagctcctggtaaccactcttctgctttctttctctatgaactcagctactagtctaggtacctcatataaatggagccatacagtatttgtctttttgtggcttctctcacttagagtaatgccattaagtttcatccatgttgtagtacttgacaggattcttttttttttgagatggagtcgctctcctgtcgcccaggctggagtgcagtggtgcgatcgccactcactgcaagctccgcctcttgggttcacgccattctcctgcctcagcctcccgagtagctgggactacaggcgcccgccactatgcctggttaattttttgtatttttagtagagacagggtttcaccatgttagccaggatggtctcgatctcctgacctcatgatccacccacctcggcctcccaaagtgctgggattacagacgtgagccaccgcacctggccagaatttcctttttttttttttaaagaatacgtctcactctgttgtccaggctggagtgcagtggcggcgggcatgattttggctcactgcaacctctgctttctcgggcccaggtgattctccagcttcagcatcccaagtagctgggactacagatgcctggcaaatttttgtatttttctagagacagggtttcaccatgttgcctaggctggtctcgaactcctgagctcaaagcaatctgcccaccttggcctcccaaagtgttgggattacaggggtgagctaccacacccagcccagagttttctttctttttcaggcagaatattattccatgtgatgtacataccacattttatttatccattcattcattgatggacacttggctttcttctccattttggctattgagaataatgcttctgtgaacatgggtgtacattcatggtgatttttgacatataggcttctaaaaatttttgtgaaatctgacctatgtgtcctcttttttgttgcttgcttccttgctgtcatgtttaagcatgtcttgctcacccacaattagaaaaagcactttttaaaattgtcttctatcatctcattttttcttattaaatttaaggctataactaaaccatattttcttaaatagtgtgtgctttactcagaatatatttgtttgcaaggaatgcaaacccagtcaaaatactgcagacaaaaggaagcttcttcaacaatacatctcatggctgcagagtcagctgggccttccaggagcaaatataccattgggcaagctatgtccctctctggcctctctctctgcatcaactctcttctctctggaccaggttttttggcttgcacacagtttgggagttcacagaactctggattgcgtgtgactttgaagtgtcttgacagggactccagctctaattctacatgattttaaatggtgcaaatactctgacaagagtatttcaaactcttagtttataatctggagagggagagaaagaaaaaacaaactggttcacccttgtccacggattggttttctttgtgtctgctgtttgttttgggcccaaacagttctcaccgggaagtgggagagggtcatgtgatacaagcaacagcaacaaaaaacaaacaagaatctccaggcctacagaaataagaacgcttttacactgttggtgggagtgtaaattagttcaaccattgtggaagacagtgtgatgattcctcaaggatctagaaccaaaaataccatttgacccagcaatcccattactgggtatatacccaaaggattataaatcattctactataaagacacatgcacatgtatgtttattgcagcacaatttaccatagcaaagacttggaaccaacccagatgcccatcagtgatagactggatcaagaaaatgttagcacatatacaccatggaatactatgcagccacaaaaaggatgagttcatgtcctttgcagggacatggatgaagctggaagccatcattctcagcaaactaatacgggaacagaaaaccaaatgccgcatgttctcactcataagtgggagttgaacaatgagaacacatgggccgggcatggtggctcacgcctgtaatcccagcactttgtgaggctgaggcgggtggatcatgaggtcaggagttcaagaccagcctggccaagatggtgaaaccctgtctctactacaaaaatacaaaaattagctgggcgtggtggcaggcatctgtaatcccagctacttggtaggctgaggcaggagaattgcttgaacccgggaagtggaggttgcagtgagccgagcctgtgccactgcactccagcctgggtgacagagcaagactctgtctcaagaaggaaaaaaaaaaaaaagagaacacatggacacagggaggggaacatcacacaccggggcctgtccgggggtagggggcaagggaagggagagcattaggacaaataccttatgtatgcggggcttaaaacctagatgacaggttgataggtgcagcaaatcaccatggcacatgtatacctgtgtaacaaatcttcactttctgcccatgtatcctagaacttaaagtaaaattaaaaaaaaaaaaaaagaatctccaggcccacacctttcccaggaaattaatgtggagcttccaaaagggtatatggggtggcaggcaccctaacatgtctgtaaaagaaactgttgaggtcactcttgtttttctcaaacagaacaccagtactcctttttctctttgttttctttttcccccactgatttgaatgtcgtctttatcatattctcattccttaagtttactatgatcttttttcctgtttttttttttgtgtgtgtgttccatttatctattcttatgtcagtgctatactggtttaattatcatagccttacgtcatatctagtacaagttctcctttattaaatcttttttcaaaatgtcttgtctcttccctacgttagtttttttttccagatagattttggattcaattattctgctttttagttcatatatacattgttttcattagacttgttttagaactgctagtaaattagtctgaggagaatttacactttcacaatatctaatgtgtgtactattgccatgcatttttaaataaaaataaattgaattacatttaataatttagaaaatttttagggcatcgtggaacctaggaacttgatccactttgtcaccaatggaaatataaagttaatctcacccagctccctactgagtgagtgaatattgtctctcatgcatgtccgtggactgtaactccaagtgagtgaaaagctgaggtaattaagtgggtaacttaggggtaggcattgacttggaggcaaaagcagttttagatgttttgcttacccagttgatggggccttgtggctggttaacaaccattcagcacttccctatgtgtggataaaacatgaacattccagggctcagagcttcaattcattaaaatgtgaatatgggtatttgttaattaattcaatgaacaattaatgagcacacaccatgtgccaggcactgtgctcgctgcagggtggcaataaaggtgggacttggtccttgctgcacagtaagtagtattacatgtgctcaccaataataacaacagaggcggaattctatcggtaccataaagcactgtgctgtggaaactcagagatggggtcagctcacagccatccagattcaggggacctttttcctctctgtttcatggagggaacagactacaagccatagccatttgatcaaccgaggggttttccaggcccaggatcaggtgttttttgacatattattcttttcattttctcatcattaagcatgatgcactttctcatcattaagatctccattcctgggttcatattcctgggcctagtttttcttttagagacagaatctcagtctcactctgtcacccaggctggagtacagaggcatgatcatagcttactgcagtctcaaattcctgggctcaagcaatcctcctgcccaagcctcctgagtagctgggactacaggcacgtatcacaacactcagctaatttctttaagttttgtagagacaggagctcactatgttgtccaagcaggtctcaaactcctggcctcaagtgatctacatgcctcagcctcccaaagcattgagattaacaggcctgagtcactgtgcctggccaggccagttcttttgaacgtaatctctgtcgacctgctttctgatgcttctaccaatttcacttccttgaaatataatacatcttgatttctaatggcagcccgatgctcccgaaagaccacagcctttggagtaaaactaagctttgctgaaatccttgctgcttatattactggcggtgtggttttggaccaaatttctaaaacgaggaagatttaattttctcatgtgccatatgaaggtaattaatacatcttatgtaagactgttttaagtgttcaattaaatgagattttatataaagcttgcagtctagcgccatatccaaagtggtgaccattttattaatatttgccctccctttggatcagaggcctcctaaacccagagatttatcacacgtcttctggttttagcctgactttctttacctttccgtgaaacaaattctttttacttaaattgctctgttagaaggagttctgaaccttaaactccttgtcaactgttgcactgagtttattagtggaataaatgtcttcaggcccactgctgaaatggataccctctgcctcctagcatgtccagtccactttctggtgcagtctctttccctcattcctcatccttgtgagccagctcagaaactacagctttattagaagcagagctaatgcctctgctctgaactctttccactcaacattcttcaccaggaatcctttctccattccttcctggccagctccagggtacatttcttttttttttttttcctaagaaaacctgctggcctgtttattcttatggggtcaactctcctggtgtcacattcccaatctctgggaatagtcttgcttgcagaagagtgacaaagactatatttttgagcagtgttgtggaaaggaaagaacattaaccagacttggaggtaggaaatagatgggattagactagtcttgccctttataaacactgtctgttttacaaggcactttctttttccagatttgttttctcagttttctactgaaagagtaaatattggtggtttctaattttcctctcagttctggcggtctctggattataaacctaattgagtgcaagcatttaaagaaataagaacagttgccttcctcttgttgttatagttggggtgcaaataaaagtttaatgcaaggatttaaaggatggatttttaagattgaggtattgaggtaggaggtgggactcgacttcagaccagcttgaagactggctgaaacagggaagaggcactgaaagctcttctccataagacacgcccaccagtgccatgacagtttgctattgccgtgacaacacccggaggttactgcccctttccatggcaatgacctggaagttacctccccttttctagaaatttctgagtagcttgccccttaatttgcatgtaattaaaagtggatataaatctgactgcagaactgcccctgaggtgctactctcagtgcactgcttaaggagtatccctgctctgcaggagcagtcacagagctggagcactgccacctcaataaagctgtttccttctaccaccagcttgctcttgaattctttcctgagcaacgctaagaatcttccccagctaaaccccaatttggtgacttgcctgccctgcaacaggtaaacctaaatactaaaatacataaagtgtattaatcttgtgtatataacttaatggatttttcctatctattcaactatccatctcccccttatccagcacctagaaaaaaaataaagaacgtttccatcaccccataagtttccttcatgttcctctccagtctaaatttaacccccagaggtagctactattctgacttctgtcattatcaaatagcttggcctaatttttgtttgcttgttttttgagcttctttcaaaagaactttggtcttggtcttcatacaaatgaagccatgtgacatgcatttttttgtgtgtttggctttcacttaacgttatattagtgagagttacccatattgttacatctgtcaccagttcacactttttgaagtatttcacataatttttcacataagtatttcacataagtatttatgtggtatattgtaaatatgccacagcctatttattcaatcaccatttgatggacattctggctattttcaattcttttactattttaaataaagctgcaataaatattcttgcacatgtcaattgacggacatatattcatttctcctgggtaaatttttagatttggaattgctggaatatagaatggaaatattttatcttcagaacaaactaccaacaagcttttcaaagtggtttatcattttgcattcccaccagcagtgtatgagagttccagttgctccacatcctcaccaacatttggtattgccagtctttttaattttagccattctggtgagtgtaaggtggtattacattacagttaaaagtgtagactttcttgaagccatgaaaaatctgtatttgagccctaggtcttctattcatgaggtaagtgaaggggaacaagaaacctaaacactctgagactcaagtttcctcacctataatacaaaggatattcttgaccacctcaagaagttttctgaagattaaatgaggtagtgattacaaagcagaagctctcgctcataaatacttagtattaaataataactattatagctactgttattatcattattattattactactgcaattgatactattcaggtaaagaaatcccttattctattaaggttgtcctacatataaggatattattggttgaaattattattattattattatttgagttggagtctcactctgttacccaggctggagtgcagtggcacaatcttggctcactgcaacctctgcctcccagattcaagcgattctcttgcctcagcctcccaagtagctgagatcacaggcactcaccaccacatccagctaatttttgtatttttagtagagatggggttttaccatgttggccaggctggtctcaagctcctgacctcaagtgacccacctgccttggcctcccaaaatgctaggattacaggcgtgagccactgcactcagccaaattatttttaaagttatatttttatgttataaagttttcttagacagttgacaggaatttaataatattgagagaagttcatttagtccgttaatccattggcaactatcaacagatatatcctatgtgcccagcactgctctaggtacaggatatccctcttgtggaagctttaagaagggagatggacaataaacaataaccaagtaggtgaacaagatagttttatagaatgatacatgcccttgatgaaaatacagtaatgtgatagagaatgttggggagcctacaatagattgggtgattagagaaagtctctctcaggaggcaagccttacaataaaaatctaaatgattaacaagaatctaggtttacaaacatctgaggacagagagttccaggaagagggaactgcaagtgcaaaggatgtaagacaggcataagctgggaatgctagaaaaacagaaggaatttgctatggctatagggagccaagggaaaagtggtgtgagggagggaagctggcagggccatggtgtgtaatgtcctgtagattattttacatttgtatatatgtatatttttgagacaagatctcattctgttacccagggtggagtgcagtgacaggatcttggctcactgcaacctccacctcccgggctcaggtgatcctcccacctaagcctcctgagtagctgggactacaggcacatgccaccatgcccagctaattttttgtagaggtggggtttcgccttgttgcccaggcaggtctcaagtgcctgagctcaagtgatctgcttgccttggcctcagaaagtgctgggattacaggcatgagccactgtgcccagctacatttgtatgttaagtgtaatatgacgccttggaagattttaaggagaggcatagaatgagcagatgtctatttttaggagaagacttttctgtgtgttatgcagagaatctagagagtcgatggaagtgggtaaggagtggaagcaggaagctcagtcctcctgctgtagcaggtcagatgagggatggtggcagcactcctgggaggtggcaggacagatggagaagagtgggtggatgtgaaatgaagcttgcaaatcgtcctgatgggccttgctgatgatagggaggagaagatgaagagaggaataaaggctctagaacagaggaagcaatgacaagaaagactggaggagaaatggtgtatgtggagggttgcaggaataaagttttcttttggccattgtcatgggttaaattttgcccccataaaagatatgttgaagtccgaattgctgaaccttacttgagatcaggattttggcagatataatcaaattaagatgaggtcatactgaattaggttggactttaatccatatgataaggatttatggtgataagaagaacggaaaggagagatggacagacagacctacaggatgggcaagagggaattgaggacaaactgtgaggcaaagaaagttactatcagcaactcttttgacatttcatagagaaggacagtggagaaatgggacggtgacttggctgggggaatggggtgaagggagaatagaacatgtaaagtcataagagttgagaagtttcagtatgaatgagcccattgagggagagaaattgatgactgaggaggagagggagaatttcaggagctaagtccttgagatgatgaaaagggataggccatgcttggaacaaggacattggactcactttcatagcagggaggacagagaaaggggatggctgtaaattccctgtgaacaacagagttcctttccgatgaggcaaggtcatgagttgaagggcacagagaacagggaacactggaggtttcaggaacagcagaaactataaaaaacatttgggaattggaagaaccaacattccagggaaggaaagcacaattcccaagaggtgaggggccctttgaaacttgtggttctcaattctaagagaccctgggcagtcacagtgatattggtgaacacaccccaggtgctgttctaagccctttacatctaaagtcccacatctactagatgtagctggtgggctctcaccactggcggttttgctgagtgaatgcatggaatgagatggaggctgaggatgctgaggatggaccatgccaacacaactggataaggaggcaaggaaggctcagggtataacagtctgcaaatgaaatcaccttcctactgggcattacagtctgaaaaatagtttagcccctcaaattttctccctctccaattgtttattttgctctgggttggaaagttctctcttaggtgcttgggaagaggtgtggtcccttgagcagatgctggccggacagctcccccacctagagtgcttatagttccatcatcttcccaaagttgaattaatctaaccccaagtcactcacatgacccacttttccaaagaatcaagagacaatagatgacaaaatcccacaagacgctctatacacgtgactacatttggacaatacagtacaagactcggtgtgtccaagcaaattctgtctcagagccaaggacatggtccaacccacacaaacatgaaatttcccagcatgtcaggagcaagacagggatcacagaatcacagaggaaccagtgcaggcaggtgtgagatggagcgcttccttttggaggtgagatgagctgacgtgttttctcctactaatcttaattagcgggtctgttttttccaaagcacattcaggagaatcgcagtgagtgccctaaaccatgacattaccagcatgaaaactgatactctcccagaagtatggggtagagaagagtccttcctggagctttgaataattttggacttaagactcttccttgactttctccctggaatattttgaaatattcagtatacttgagttttgctcttctagtagtaatggtagtagtactagtaatgatagtaactatttatcaaataactgtaaggggcactgtgctttatatgaattgttggggttttttgtttttcgtttgttcggttatttatttatttattttttgagacagagtcttgctctgtcgcccaggctggagtgcagtggcacagtcttgactcactgcaacctctgcctcccaggttcaagtgattctcctgcctcagcctcctgagtagctgggattataggtgcgtgccaccatgcccagctaatttttgtatttttagtagagacagggtttcactatgttggtcaggctggtctcgaactcctgacttcgtgatccgcccacctcagcctcccaaagtgctgggattacaggcatgggccaccgaacccggccgaattattgtacttaatttagtcttcatcccttcctcatgagcgaggcaccattcccattttacagatgaagataatttagaaagcatgaatggttcatccagagccacacagctagtcccagaaccagaaagacttattggaagtctatgcttttatcgcctctatgttactgagatatgcctagggccatttggcacttcaggcttagctttttttgcaagtatggtggaatgaaaggaactcccagcatagaaagacagggaatttagagtccatcctaaatcacagcttagtcactttgtgactttgtgtaattatttaacctctctgagacttaactcttttggcaaatagagaatgtcaatattttcttcacacattttcctctagatgttaaaaggcattcatcaccaatgtctcagtccaaaggcacatgataaaattatctaagacggtggcagtttctcaggatcatttagttaaaactcattcatttggattcactcataggacgctcagtgtttttgcagaatgtgagaagaagtcaagaaacagagaggaaagcaggtctcagttgccccatgggctaacacaccatgcatctgcagggtgacaagaggaaactgacaattccttcatttcttaatagagccatgaggtctaacctgtattctcataagacgctgggtgcaaagaaagagttgttcctccctgcagagcaccacatcgtttgcctcttctgcccggctcttttcagggtttgtcttggccagggtcctgcttatgacaatgcaacagctctgggatgctgaccagtcagagacaagaatttggttaagctctgggcatctttccaaggggattacagccagcatatctgaggagaaaataaatggcgcgctggggtcccctgaaatagaactcagccttttgcgttgttttctcagactgtgggctgctaggcacattgaatgtgcccagggctgggaaatcaaagacactgactttagtccccacttaacagtcaacacctccatgaccttgcactgtttactatccttccctagctccagtttcctcattagcaaatagaggggcgagaaaaggtgaccttgaagactctttctgttgcaacattctctgactttatcttgatggcagggagtaagcagagggtttagcccctctaaaacctcttaagatcaccaccatcaagcactcctctccctcatccctgtggcaaatagttaggatacatgagaggtatggttttcaaacactgtatttttagccatgtaactttcttaagataatatcttacctgaaagcctatataatatacaggagaccccatagtggagctcctcaattacaacgggtgagttgacctacagtttgcccttgaccctccccttctttgctcttggtctcagctggagacgtccatggatcccatatttacgtttttgtttgtttctttgtttttggtttcaaacacaaagcaccagtttaaaaacaaaatccaaaccaacaaaatgatgatttgggggacatttagttgaatcgaaagaggttcgcttacgaactgctttcgggaggatccacccactctttggatggctatcaagctgcattctaggttcttagtccccaccccatcttgcctgtgctcctcaagcttccgtatctgatgagatcttctgctttctcttagggcagatgacaggatgaaagcaccatcttggaagtcaagagtatgcgtttctgtttccaagactatctgcctttgtgaccttgagaatgccactactcaccctctttgggtttatacttctttagtccagtgagagtgtcgggtaaggtggtccctgaatggttctgacaagctgggatggtttatcctgagccttcccatctgtggacaccttgcattcacctgatgggctaggcacttagcaatggtcccctttgtttccgccagcagcagtgtaggcagagggaagacaaccagagaggagatctttggggtgcccagagtatttgccaacagctcttctaactctgcacagactctggaggacacagtcttcatgggcttatgtgagcaagcactagaattgtcacatgaaataacacatccccagttgctgctctctggagatttttgcactagctagtgtcagtgcaatctccagttagacctggcctgccccagtttacctcggtaagagcaagctcagaagctgccttgttagttcagcaaaaagttaatgcagagaggagcacaggtctcctggctcccagcccccttctcattgtatagtcagggttgtgtattcttgggaactggaaggagccctggggcttcctcagggaaggagccctcaggccagagagcaaaccccgggctctctccagctcccttttcccttgactctttatggcctgaggtcagcttgaggcacatgcaaggtaagaggaccccagggaggtacatgggaaagaggaaaactgtggtcttaatgcaaagagcaactcccatttattgagggcttatttgtgcagagtattagacgaagcactttatacacagaatctcatttaatcctcactgccctcctgtgaggttaggtattagtatctgtgtttgataaatgccttgtcatttacacatggaaaagtggcccctctcgtttcctggcccttgtacttctttttataaaataacgttattaggtttttgttgttgttgttttcaaattaaaaagtacagagaaaaacaacaaaaaaaaatggcccatgagcccactttataatcccagataaactctaaatattacaaaaattaaaataacacgtttagaatattcaaaaattaaagaaaataataaaaatcaaaggcaaatgcctccctcccatcagccccacccctctcctcaaaggaaagaaagttttaatagattgtgttcatgattatttccagaaaaaaattattgttggtataaatcatcatacctggaatggacctatagatatttcctttgtatgttttctttttattgttatttatataaaagaagtcatacataagcattgctctgggtcttgcttttttgttgttgttttttcaactttctgtatcttggaaaccttcctaccagcacatacagctctgcctccttctttttaacagctgcatagtattccatcatggatgttggattccagtttattaagttcctcactggcagaaactatttgcaatgaatcctgcactgtctagcctggttgagatattatggaaaattttgagggcatgtatgtaaggtaaatttctagcagcaggaaaataggtcaaaggcatgcccttcaaattggcactactgattttcactcccaccagtgggaatgaggtgcccattctcctggcactgggtatcatcagattcttcagttttgccaaactgattggttttctaaaaaggtatcttatattttgctttgtgttttcttaattgggagttaaggttaatcatatttttaaatatccattagccttttaaaacattttctttccgtgtgtagtggggtactacctattgcttttctttttttttcagtttttgtatatttttaatgtgttttttctagttattatttgttcgtttgtttgtacctgtgtgccttttcattattgacatgctggagttttttgtaaacaaagggaaaaggcctttatctcatgtattgaaagtgtgtcactggggtataatatgtgttttatcttttgtctgtggtatatttttccatagagagtttcagccgtgcatggttgtacagaagggcctaagcaccattcaagctccctctcagcttgtcagaggccagctctgtgcctgttctgagggcacataatgcatttcaagcaggctctaaagatggagaattgctcccccacccctcaagctactttcggttttatttcatgaccacagtgtacttttattaccctgtttttacaccagattttctggggcaactccagtatcatttaactttatttctgtcaataaagataactcgttaaatgcttaaaaatgtgtaatctagtttgccaatcttttcttaatgaatttgggatttgtgtactgcttgaagattacagataaatacattcatgtttttagaaattctagagtttttttttctttcttggtggattttttcatcaggtctattttaattctcccatctatggtgactcgtgggtattttagtccctgagttcttaaaactggacactctttgtggcctttattcttaaaggataatttggcaatgaataaaaccctcaggtaacagccacttaaccaaaagccgccaatcagtctatccatctgtctatccatctatccatccatcatttatctagattataaacaaataaaacaaaaaattgtttaattgtcaagcaagtctccagctacccagcataggaaatgaaacagagaagtaccttttatactttttctcaattacatttttcttcttacctacagaattatctgttatattaaaatctctatcatttcaatgaatttctttgtatctgtataatactacatatgcacgcatcctcaaacaacataatgtgttatgttgcatattttaaaactctctctgtgtcatgtcatcctgcttttcttgtttgctttgtgcattcatcattatgactgagaaccatccatgctgatatttagagctctggttcatttaatttcattacatttcatttgtactgtataagaatacattgtgtgagtacaccactatttatgacttttctctggctgggaagatagattcttttccctaattgtcggtattacaaacaatattgcagtgaacatgctggtgcctatctccttatgcacgtgtgaggatttatctaggttatatacctagaagtagagtggccagtttcctgctatatccacattcaactttattagccattgccaaagttcttttcaaaggagttgaaccgatttacactcccagaaaggtacatgagttcttgtttctgcttattcatgtcagtaggctcaggcattttaatttttgctagtctattgagtgtgaagtgatacctcattatggttttaatttgaatttccctattacttgtgagattgaacactactttatgtgtatttgccctttgggttttctctcctttgagtcgcctatgcatttcttttccctatttttttaattgggttgtttactttcttattaatgtgaagttatttacgtgctctagaaagtaatgtaaatatacatttttagtctttgacttgtagtttcatgactgcttttgatgtaccacagtttaaaatttttttttgttttctctctagtttttgacttgagtcttgtttaaaaattcttactctgagatcattaacatattctctctgattcttatgtgacagtttttagtgtgtgatttttttttgtatttagcttcttagtccttgacttgatttctgtgtatgtgtttttgtgtatatttgcatgtatgtttatgtttgtatatttttcccctatttagtgaaaagtctggacttttttgtgaagaaagcttttctattctcctttcttttcattattttcagtgaatttttaggtagaggaatggaatcaaaacatcttcattcaaaaataatagcaagctcttatcctaaataatactagtagcccttaaatagtaatagtactagcacttaatactagtacttaaatagtagtaatagtagtacttaagtaatactagtactactgttctaaatgctttgtgtattcatattatatataacacatatataattcatattatatgtaacatatataatatgaaatgggcgtcatcattgttttcatttcgcatttgaggacacagacacacagaggtttgaatcttgtcagtcatttccagataagagtgtccctccaccagtatactgtcccacctctacaaaaatgaaggggtcaaaattcttaaaaacgttgctgcactttctgtaggttttgtgttttatgatgttggcttgagtgttctcctttattttttaaaatggcatttcaccagggtatatctagatatcggtcccttttaatgcataatctggtacttgattatttcttttgatcgaaagactaaagtcttccaatctgttcagaaaaaaagaaaaactattaacttgtaattattgcttctgaactctcccttttgtctctcctctgggagtcttattttaaatagatatgactcctgaagttgtcctctgtgccctgtcttttctcccacagtttttatctctttgtccttcccctctgagtacccagtgcctttctctcattggactctcctttatcagcttccttgtgtatccgttctctagtccagatctgcaacccgaggcaaactgtcctgatcagtttgtttcccccttatggctgttggtctaatctcacagatgcaaaattctgttaagtctttacagagatcaccatttggatattatctcatttttttccctcctttccttacagcaaatctgtttcacagagaaactttccctccacttgctttcttatcagagtcagccgtatcacacactccaggagcccagccatggtcctctctttagcttgaatctgcctcctgcctggggacagttgtccgttggtgctgtctctaggacttctgaattgtgctgagatttgggaaaggcatggagttctgacgggaggtcgaggcagcctgagcagcgactgagctaaaataaaatctttgttgctttagggagggttgtcagtggtgaaggtgagggggcagtggcagaactggaggtatagacatcaccaggatgctgatttgcaccattcagttcagcaggtggtggaaggcatgctctgaaacctgaaaccatcctggtccctggctgtggactgtgtgtctgtccgtcctgtgacatggaagtgcttatgcttcacggaactttggcttaacttctgttcagagctctgctggatatacatggttgtttctcttgaactgcaatttggtcaaagtttgccctcttttgtcctcttaccctgataagtggcagatgggcagagactgcaggacaaggaagggggtggttctttgtgttacagctaacaaatcctatgatacccactcatataatcatgagttcatatcatcaacccattaactctatgcatcaccaaggaaaagaagaggcactgactcccctctcttctgtctgcctgcatggggcttcatgtttttttttgtttgtttttttttttttgagacgtctcgctctgttgcccggcctggagtacagtggcgcgatctgagctcactgcaacctccacctcccaggttcaagcagttctcctgcctcaggcctcagcttcccgagtagctgggactacaggcctgtgccaccacacttggctcattttttgtatttttagtaaagacggggttttgccatgttagccaggatggtctcgatctcctgacctcatgatccacccacctcggccttccaaagtgctgggattacagacgtgagccactgcgcccggcctggggcttcccttttaaccagcccttcttctcttcatgcctccctggttcatattaaactttggaggctacagagaatgcagatcattctagaccttgaccctgggtccagcagaagactgacctatcactggtccaaacatagtggttcatgaagagttgtccttggacctaagagcattattagcatcatctgggaacttgttaggaatggaaattgtcaggcctctcctctgacctactaaatccgggattctggagccgggaccctgcgatctgtgccatccaagagagtgtggtgcacgctcaactttgagaaccacagttcaaatgaaagctgaaactgtcattgtgctttttccacctcagtctcatgagcagctttaccaaaaagtgtcccaatggatggctttgaaaaacataaaagcttcatagacagttcagtgatcactgccttgtgagaagtccctagacttggtttttatgtagcttttcatttcattgaactcaacattttccaaactgatttgactaaagaattctttactcctttcaaatgctcttggtgctgcctcattatgccccagcattttttcttttttcccaaagtgctggggttacaggcatgaaccaccacccccagcctaataattctgttctataaaagtgagggttgtggccacagtattttacagcaagaatgctcctcctggaaagctgtgtgccctaaggaaggaggtaacttattccagaagggagggtgtgagggaaacagtggcaagattctcctgttcctgatgcacgaaggcattacttctcagagtgtggtccccaaaacagcggcatccgcatcaccaggagacttgatagaagtgcagactcttgagccctgtcctggatcttctgaatcagaaactctgggagtggggcccagcacctgttttaagctctcctggctatgctgaggcactctcaggtttgagatctggggtaagagggagggaatggagctagactccactcttcggaggaagaatgctgaagccctgaacataaattgtgggtagagctgggcgcctaagaggttttcattgaagtcacctgaataaactgagcttagttgttcctccatttacactaaggcagtggttctcatttccggtggcacattagaatcactagagagtgctttaaaaatatacctgcctaagcccggaccccactcaattgaatcagaatctctggagttgagtctgagggtctgcatttttaaaaacaaattttactttaagtttcagcatacatgtgcagaacgtgcaggtttgttacataggtaaacatgtgctaaggtggtttgctgtaccggtcaacccgtcgtctaggttttaagccccacatgcattagctgtctgttctaatgctctcctcctcgtcccccaactctgattccagcacgcacccagggttgcaatctactgatccagaaagtggcattacaaaaaatcacgctttgtgttgtctttgtattttcataaatttttccattaggcatttattttacctatttatatgagacaaattacatattcatacggaaaaaacacttggaaaatatagaaaagctgaaaagacagaagaaatagcactcgtgttcctactatccaaagacatttgtctttgatatgtttgtgtgctttttttctatcttgtgtgtgtgtgtgtgtgcgcgcacatgcacgcactggtttgaatttttacagcactgtgattctgtttaatgaaccgtttctgtccatttttaaacttaacattatatctgaagtaggcctgtgcattgttatagttatacatacgatttttaatacactcttttggtaacatgaaagaaatggttttttcacatgtacatactttaggagggcatttagggaggcctttctttttttacaatgcctgtatttcaagcgtactgcaaaatcctattttgaatgtcagaagtagaacattaactcggttctctttgaatttctatccacaatcctaacctgccctctgtcttttcctccccacaaaaccacaggtagatctctgcattaagcaggcaggggatagtgtctgctgcataaagttaaagaagcgaagcacgtatatattttctcagtattttgtaaccaccattctatttgtcagcctcagctgctgtcggatttctctgaagtcacgagctgtagtcccacaggttgtggtatgattcataaacattagaaagaaaaaacaaatgaataatggatgaaagagacagagggaaggtgagataaaggaaagagtggtgggacaaatagactaaggttctggtgtaccttgcgctcagccagaaatgccaaaatcaagccgtgtatctcgtttgttctcctatactttcaatgtaatgtaatgttcccaggactttgttctttgttgcacagttttatatacatatatgtgtgtatatatactaatatactagatatatatataagtatatatactaatatatacacacatatatgtataatatgtatatataattatatatgtgtatatgtatatatattcagtaatatatatatttttcatatataatatatattttatatgtatgtgtatatatattcttggctgcctccaccttctgacttagctgctggtttgaaaacatgcacgccatcactgttgggtgagatgcagctgcgcttgtcttccatgttggtgtcgtggatgcgccaggtaattctgccccatcttcttgcagggcattatgggaaggatgcttaccgaagtggaggacctgatctccataacttcatctcatctggatttgtcacattaggaagaggacacaccaagggtacagtggaaaccattttttactaaaatacagaggttgcctagggaacgccatctgaaatgagaagatggtgtggaggccagaggcttgtctgggacaggaataagtggggtggttccatggcagcttgtcctggtgacatgcgtggcttctgacaggagttactggaggtcacaggtgtgactttagagggcgatagacttccaagagacacccatcccactccacccatggcggggacacagatgccggcggctccttgtgggaagggaccacagggagtgtggtggaaaactgccggtggatgtagcagcatttgcaatgtgtgtgttcgcctcttggctattattccttttccttttgaaagctacattttataaaccaatgtcaatgttctgtactgtggtatctaagccggtgtgcatgtggagagtttcagcatcctaagtgtgtctccataaacactctatgatgtggacacaaaggtagaaggttatgcagaccttcaagcctcaagatgaaagctaacctagagtttctgctgagctgctttacaacctagctgacagcttgcagagcatctgtgcagggggcatggactcctcctcaattctgtcttttgtttaaacaaggtcctacgagtgttgtgagcattctgtcacatcaagagtcactggatccctaactcctttaattaccgtcccaacacctgtgtgctgttatagatcaaatgtgaattctgttgtaggggtagtgtatccctgtcttcccctgagatacgtgtcttgtgtgagtaaacaaggaactgtgcaatattttcttacattccatgcacctactttttaaattccttatgtgatgtttgttcatcctatagagaaaaaaaaatctgtatctgtgtatgtattttctgttgtgtctatttgtgtctaaataaagtttatcgaggatacaggtggcatttgtggctactaagagttgcagaatcaaactgagaccagctatctccagaatgggaaatggacttcacatttactcactaaaagatacattctgggccatagtctattaactcaaacctgggattgctggtccccacatcatccactttgtgattattacctagcactgtgagacaatttactctcaaacttagcgttttaaaacagtaataaacatccgttatctcacatagttcctgtgggttgggaacctgagtgctttgggcttggagtctcatgaggttgccatcaccacgtcaggcagggctgcctcctctgaaggcttgactagggctggaggatctgcctccaagacgcttcactcacatggtgctggatgttggcaagaagcttcagttcctccccgtgacattctctccctgggtagctgagtgtcttcactgcatggtgcctggatttcctcagggtgggtaatcagagaaggagaaagacagaagacacagcgtctttgatgaccaatcctatcagttgcacgccattacttttgcaatatcttattctgagtgggtgggaactacactgagttatgaatatcaggagccgaggattgttgggggccaattcggaggccagctaccacaagcctacaaaccttggagcagaggtggaaatatggatttccaaacagaacacggcaactgttagggaggtttctccactgcagtggttccccaccctttcccctaccccttactcttataggtggtccaacccaaaacacccaacacttcaaccaacagaactctttatacatataataaatatgatggctttgggttcatgctttctttcaacaaatatttaatgaggcctgctatgtgctaagcaatatttagaagttatggagtttatggagttccttacagaactcacattccactgggagaaacagacaaaataaattattgacaataagtgcaaggagaaaaattaaagcaggcagcagggagtgcagtggcaggaagctggtcttcccagggaaggcctctccaataaggtgggaattggggaagtagaaaggaggccagtctgagtacagcaggataaaagaggaccagagtggaaagagagaggatccaagccataggtgagccagatcatgcatttatccaatagtggacgttaaactgcttccaaatgaactggactccatcagagccacatgaaggtgattcccaatccctgtctgttctttcagtcactgctgctgggggcatccaggagaccctcccctgcccatgcctgtggggctgtgctgtgtctgatgctccttatctcccatcttaatttgttctgtggcaccacctgcccctcctgtgcgtgcattgcttgttctccccattcactatttgtgccatatttttctccccgttcctttctctaccaaggcttctgacaccttctctttccaggaatgtaccttgtgtgtatttccctatttagagaacagctaaagtttcaagaacaaagaatctgggtttgaggttggtggttgggggtagtgggtgcaggcagacttcggaaatggagattccgttttttagagagagagagagagggagacagggtctcactctgttgcccaggctgaagtacagtggcacaatcatagctcactataacctcgaactcctgggctcaagtgatccttccatttcagcctcttgagtagctgggactacaggcgcatgctcccatgctcagctaatttaatttttttttatttttgtagaaacagggtctcactatgttgcccaggctggtctcaaactcctggcctcaagtgatccttccaccttcccctcccaaagtgctgagtttatgggattgagtcactacatctggcttgaacttcccttctaatgtcagggactctttagtcctctggacagctgggatctctggaaaagggcaaggaaccatcctctcttccttcagagcaaactaagttcaactctaagtgctagctgtaagcaactggccccatgtaaatatcccatggaagggaacaattcagaaacatctaatgtggggtcactttcatttgtatgtgtttaattctctttgttttatttctctatcctttgtttcaacttcagtgactctctttctggatcctcttcctttattcctttttccctcttcatccaacattttcctccagcctcctggtggcatctagccattgcgttgccccattttgactctcaggactaaatgggtagccaacacctgctttgcaaggtaataccattgccctactaacccagatcacttaatttaatgtgtatttctaatcagactctgattgtccaagagccaagaatggatggtccttgttctaagtgaagatgggagtcttcattggaatcttagtcgacatcagtcctgtcagccttttttttttttttttttttttttttgagacggagtctcactctgccacctaaggctggagtgcagtggcacgattgtggctcactgcaacctctgtctcccgggtccaagcaattcttctgcctcagcctcccaagtagctgggactacaggcatgcgccaccttgcctggttaatttttgtatttttagtagagacagggcttcaccatgttggccaggctggtctcaaactcctgacctcaggtgatctgcccatctcagcctctcaaagtgctaggattacaggcatgagccaccatgcccagccctgtcagcccttttttataggctctagaggcagcttggagacagaagcaccgtctagcatcagcgggggctcttccacttcaagggcctgggggtaagaatgcatatggatctgtctgctttgtaacaagatccatagttcatgggtaattaaatagtctcaaaggaagcctgcaataaacgcgtattcttttgttagtgggattgagaacgtgagatcttataaaacatagaattctgcctgtgggagctccatatccctcaaaggcctctactgtctctcccacctgttggtagagccttcatttttgtctagaaggtcccacagtgattggccaaccccccaggttacatagcactaccttaggcttcccaggcactagaattagttctgacacccgttttcaggactttctaactgaatggcatactcattctttctcttatgattcttacttttcctcttactatctccttctaagtacctgcttctgcatgtctccctttcttggttcctttctttgacctcctgttcattcatccctcatgataaatagaatctaggtctaagatgctgatctgaatgaccatgagtttaggccaagttccccctgaaatattttcttcgttaattagacaagatcactcagcccccaacactggaacccagaatggtctttagcaaggcaaagagtcctcccaggctgccaccatgaaaactcagtgatgaagacttctatttgctgagcatttactatgtaccaggtctttacatacatacatacatacataaatacatacatactgtgtgccagtatcttcccctttacaaccaccctgtgggagagctcgttaccttcatttcataggcaaaaagtgaaactcagagcagttgagcaacttgcctaagtcaacatcaagcagtcagtcttgttttattcccaatccaggcctgattctgaagatctgctgctgctcactgtgctatcctgcctctccaagctgcggagcagctgaggtggtggatgggctgtgcttccatgggaaccacaagtagatgctcagtggaagatgactcttcttattagaggcacacattttgcaagacaggaagtcataaaaaagataagccaggagttacagcatgaacactagattggcagggactgcccttcctgggagaaagctcagccccttcagatagattttcagaatctgtctaaatgaatacccctatggaaaccctattcgactttggcaatttggttaaaaactcagtccggctggttgatttttgagcctggttgaaaaagccagagaattctttccagaacccccacatttcaatattgtcaattccagtcgtttccactgggatatccctggccacaccagggtaagtaaggggtccttacagtggtggcagcggcagtggcagatgtgctccctgcagctgcagagtgaatgtgacatacaggtccccatggaggtgatgatgcgagttactgcctgccctcctctgatatttctcaccactcaccaggtcctttctgccatgctgggagccagatagacgagggtgggagttagagagagagagaggaagaaagaccaagggagagagaaagagaaatttttgaagcctttggtaaaagaaaggagctacagtgatcgctctgttgtaggagcgattgcccgtttttccattaattcctccactaaatcacatttcctgagcactggctgaataccagacactgttctgggcactgaggatacagcagacaaacttacatgtcagtcagagaagacagaaataaatcaagatgcaagtaaatatatgaagtaggtccaatggagttaggagctttggagcaattaaggcagggaatggagtggggagctgcactttttaaaagagagtccagaaggccttaggaaaaataaaaaaagaagtgacattgagcaaagactgactgacggatgtgaaggatcaggccgtctggattcccggggagaagggtcttccaggtgaaggaacaactgtgctttgcctacctggcttgtgtggggcgcagcaatgaggctggaacagaaggagccagagtgtagtggttggaggtgtggtcagaaaggtgcagggaattgaccccacagggccctgtggggcatttaagaatctggcttccactctggggaaatgagaaaagacacgttttggggctgaggtattggcaaggtggaagtctgtggaaggaccagattttaggcagagatcaggacgcatacgaattcagtgtgtcttcatgttaagtttcagatgcttgttaaccatccaggtgaaaatgctgagttcaagggaaaactcttggttggggatagaagggtaggagtttccagtaggtgagtggcttttgaagctgggaggatattagctagggagtgagtcgtgctcttcaggtgatgaggcctgagaatggagccatagggcaccccaacagggagaggctggggggatgaggagggacctacagaaaagacaactcaagagtaggtagccaggcatcaggaaaccagggtggtgtgctgtcttggaaatagagtggaaaaaaataaatgttcccaagaaagggagcaatcagctattatagactgtagagaaatccagtgagctgaagcgtgagaagtgaccacgagaccgaggctcgtggagatcattgatgaacttggcaagaacagtttgggggtgggaggggggaacatctactcagtggatgcaagagagaatggatgacgtctgggatgtgctcattacctggacaaaccaagtgatgggaagaggaaggtgcattatttcagtaaatgtcagaaatgtttcctaataaaaagttacaagtgggaggccaaggagggcagatcacctgaggtcaagagttcaagaccagtctgaccaacatggcgaaaccccgtctctactaaaaatacaaaattagctgggtgtggtggtgcacacctgtaattgcagctacttgggaggctgagacaggagaatcacttgaactcgggaggtggaagttgcagtgagccgagatcatgccattgcactccagcctgggcaacaagagcgaaactccatctcaaaaattaaaaagaaaaagaaaaagtaatagaagattttaaaataagagaatgggagaagacaaatgcagactacaggtactgacaactctttagagttttaatgttaaggattatagagaatgagagcagtagtcagccagaagggaggatggtgaaaagagagttttgttttgctttgttttgtttttttaagaggagagaaatcacagtccatttatctgcagataggaatgatccaataaaaaagggaaaaattgattatgctgggggtgtatttcagaagtaacattcttggtaagtgaaagcagatagaatctacagctcaggcggggcgctggccttggcaaggagcaaaccccaccaggccacatatgacagataggccacacggccacaggtgcaggcaagtgggtgtatgtgatctttgctcagtgaaatggaaagcaaaccatcagctgtaagtgaggggttagggtgaccgaccatcccgggttgcccaggactgtccagttttaacactgaaagtcctgtgtcctaggaaaaccctcagtttctggcaaatgaggacagttggtcaccctaatggtgtgggagaaagctctgccagtctggcttcaaagcatttttcacgataacctgcagaacccagagaagtagcataagggtgcttctgcccagagctcgaaccggcacagctccaaggccctaggaaatattgggactgctctgaggtcacctgggagatggagacaaggccagaatgcaagaagctgttggcctgcgagcacctttccagaccccacagaacaaccctgaacagatctcgtcatcccatccaaataatgctgttggggactggtttgggtatggccatcctgctgcccagacaggcactccatggggtctaaggcagaaagttcaggggctaaatgctaaaaaaggggtgagtgcattggagcaggtgatgagttcaaggctggaaaagtgaccatcctgaggccaatttaggggtctcactaacaagggaatcacagaggtgcccccttgactgtgcaaacccaccgatctgaggaggaggagctgtggggctggagggattctagacgctaggctgatggcacctgctatatctgactctgagaagggcatgaagccaggcctggcttataaaattcagaaaacgcagagatgttagtcagtgatgatgggggtaaatagtctaaccagcataagagagcaggacaaggggaagcaaggataagagccttagtccctggaattggtgggggatgtgagagtagaagatttttgaggagtgtgactttgggaaataacaatggccagggactaaccattaacgtgggaggctgaacaaagcagagaagttaatcaaagctgaggtcagggacctcctccagctgagtcaggttttatgtggactgtggacatcctacccagcactgccttctggtgctgagcttgctttatctcctcagccctttctgcagccccacagctgatctgatccaggggccgtgctcaccactcccaccagcccatttgtctgggtgctgctcatggcctcatgtgatacaagatttgaaattaggccttttctcctaggaagaaagtatggatgtgtatgtgtgggcctctgtaaagtcacaggctgccacccccacaccaggatttgggcaagaaccccagaccaacagtggattgtggcaaggagatgtctgaggcatttgactaatagaaccctgcctagatattttcacagtccggagagccaggggagtgagtgggtttgagtataccaaggtgtttgaatgctggactctagataaagcgcagcactcagaaggcgtcgagtctccatggcaacagtgagctttttcaaccctgagagggaagcacaggcttatctgggaatggactctgtgaagccagtaccacctgggagccgtctttcttgtgtggctctataggtgaagggaggatgggtaggagtgggagcagagcagagaggaactctcgggttctgggctgagggcaccaaagatctcagctgactattggtcattcggatctgcatatgtgggacggcacccctgtttacttcatgtctgctcactcctgattaatgtctggatacggagaacctgtcattgccttggtgtgctcagctttattcagtagtgtttcccatgaccctggttagcacacacaggctctccctaagtcttacccttaggaaaatctgcggcatcggtgtgattccatatgttgttagaatccagtcaacctcacaccatagctacttggtaaaaaaaatgattgcatcagaagtaaagatgggcctgtaggaatggtaagttttatcttcaacagaactactgttcaaacaaaagtttatatatatatatatatatatatatatatatatatatatatatatatatattttaaaaaaggtaaaaaaaaaaaacctttgagagtttctcagtcgggtagttctgtttgcaagttcagccattttgcctaagggcaatgattctgcaaaactccctttcccatatgggttctgttgacaaggatacccaccaccctccagaaagcagaaaggatgctgtgactcctcagtatggcccaggactctgtctccagctggattcacagcaattaagccagtcaggttgatatgaggagcaggagagcactaagcactcaagcatgggacaagttcctgagccacccacggagtccacctctaaggtagcaccaccacatttgccctcaggagactcactcatatccctgtttaatgcttgtttgtgggcctgctaccattggcccatgtaggtggcaggcgaagccactgggacaatcttctggactggtgtaaggagaggagagatagtacccggcaaaggaggagtgccagataaactgcaaggctgcttgcttgcggaagtttcagctcttacctgtagggtacatgtatgctttcttcaaaaggggaataactcaggcatagctggatctcccatggcccccggtagggagcaagagagactttaggacactgagggtcatgaatgtgtcccatattcctcagcattcaccagcttgtcttctttctattaggcagaaggggaggctcacgggaagtctgttataaccctaatcttggtgctttctttaccatctctttgggagaggagagagggcggagttctgttttgccagaggctggcttgctcagccagaggtctagcagctctgggctgttgctcttcttgttttccagtccctcgctggtgccaaatctgagctttctcttgccatgacccttgggctagtacaatctctcctcctggcactggtcttggcactgagtggtcatctaagttgggaatctccccttcttatgtgccagcccttggcatttgcttccctcattctctactgctcactgccaagagtcttacagaccctgaaagctaagctatggggctaagtcaaaccccaggaaggtggtaggaatggcttctctatgccagcttgggtttgtggccaggagaaaacagcctctcaatcaacagtggccaggattccatggtggcctagaagtggggcagaagactggtgttctcagggcatcactgtttgaaacataactatattctgtgcagattataaacatggcagagtaaagacatttcagcctctcttgcctagaatcatggcctcagcctcagtcttactccactccaaatagtaacgtaaattttcttcattcagtggttgttggaagaagaaaactggtgaagagagtcatggagtcagacatgctggacttctggctctaaccttgctagctgtgtgactttgacctctttgacattcatctatataatagggtaacagtactacctacttatcagggctgttgtggagactgtaggagaaacacctgcaccagagctctgagcactcaagcaatggtagcccttcatgttgttggagtttaagagcgctgtagaatcttacccctcaaaggatgatgcacagaccagccattgggcttcacttgggagccagtgagaaatgcagactcccaggccccaccccaaacctactaaatcagaatcaccattttattataacgaaaactccaggtaattcatacatgcattaaaatttgagaagcactgataaaaaatatttttttttaatttcagtgaagtcccctcaatggcctttaagatcacttctaagattcatatgccacacagtctcattctatatcctgcatgttggaagccaggttgtcccatagctgaggaagaaaataatttgaagagctctgagggaggatgcagagacctcttaagattccagtgacctgttctagatagggaaccaaaaccagcaacagagacatgttacatttgcccattccagtgaaactcaggtatcagttgagcaaagatgagtaagacagattctgcctgtgagaagccaggcagtaaaactcctgccgagtaaatgggaagtgccatgaagtagataccatgaacagtggaggatattataagagaaaaatgttgcctctgaatggacgggtcctaaatggcctcctatgggagacggggttgagagaattaccttgcaggaaaagaagaaagtgacgggctgagaatagggcagggcaggtatttcaggtgggggagcctcctaaacaaagacatgatcatggaaatgcagatgtgtggggccataagtcacctgtagagggtagagcagaaaagtcatgggaccataagccaactgtagagggtgggcaggaaggtgatggggccataagtcacctgtagaaggtaatgagaaagcgatggggctataggacacctgtagggaggtagtggaaaagtgaaggcaccgtaggacacctgtagggggcagtaggaaacagagctagaaaggcgggttggaggcacaaaaatgtgagctgagttaaacattacaattaatgaccactgcccatgccctcttcctccttgttacacttctgcctttaagaacagaactaaggagcaaagcagcacgcaaaaagcagacctctgtgtgtggctgactccatggacagagatggactacaaactgatgttcaactcccctcacctctactcttctcagcacgactgtccccgtttgtgtgaattgtggtgcagctcagactgcagagctgaagggagttgagtgggtttatggatttcgtgctccccagagactcaaccatggccccaatcatggatagtttcactgttgcaggcctcagtttcctcatgtaaatcagagcattgaagattgataagaccctttattgtccgacattctgggatagtttcaaggtaagacacttcctaaatgtcggcctactgcatcgaataaggtggggagcttttcccccagaggatgtctttgagtttgaacaccccatgtgttctcagagcagtctattcttctgccactctgagtcttggaccattcatatccttgtttaccagtaataagaccctcccaatatgaacataggactgaaaagaagtggcttttttctaaggttaatagcagattgttcgtagttcatacctgaaggcccttccacaaggaattcaaaaatgtgcagtttgggttcagaggggccagagctcataaagtattcattccttgaataggattgatgtcagactcttgttctcttcatctgcttcccagtgaatcttttttttttcttctgtcctgggggagtaattctggggaaatgtaatggttttctggtttttcactaagagcagttgaacgcctgagccctgaatccatttaaccaaaatagatagggccatggcatagtcattagctgctgtgccaaaactcatgttgaaatttgactctcagtgcggcagtgttaggaggtggagcctagtagaggggtgttggctcttgggggaggattcctcaggaatagattattgttgtcccatcggggtgagttctttctctcacagaactggattaatttcctgagaatgggttattataaaagtgagtttgcttcctagatgctctcttgcttcctctgttgccatgtgatctccatacacacctagaccccgctttgctttgtcatgaatggaagcatcatgagcccctcagcagatatagctgcccagtcctggactttgcagccaccagaatcgtgagcgaaataaacctcatttctttataaattacccagcctcaggtattctgatacagcaacacaaaatggactaagacatgagctatgcccagattggggtgtagcagattagagagaagcttacgcttatgcaatgaagacattgttcccacagtgaaaaaccaaggagagagccacaaatgtagacaagtgggcagtgagggaatggagccccaagccaggatccacaaagaaggccctacatggctggggctgaataaggcaggttctttggcagcatcaggtgggaggtggggtaccagtggaccaaatgagtagaatcagtaaccccctttttgtgcgaattgagaggttctggggaagcctcgctcttgagcatttgcccctaagcctattgttctacacaaattctgtcatcttagccttttctttagatatgagacattcctagtcttcaggagatcccctttaagaagatatctgggcatttattgaggtattgggccttggtccttttcctccaaattcctcttcccctagtgttccccaccttggtaaatggctccactagctatacagttgctcaagcagcactctacacactgcacactatccttgacatctttctctctctcactgcctgcatccaagtccgttaccattctatttcattctcttgaacttacacaccatttgcccccttcttagccaggatcctagtctgtacctcctctgcttcccatccagatgagttgcaaaggtctcctccatgcagttccatttccactgcccacccttcacccacatcctgtcctctactgagcagccagactgatctaactcattctacctcatttaaccaaatttgctccaatgtaccttcctaacctaatgtattccagtgtaatctttctaaagctcagctctattgttattacttaggttatttatttgagccagaatcttatatatatatattaaccctaactctttggaacagtgcttgcccatcataaaaatgctgagctcaaaactctgaaatggcaagatgcacctactcttctttcattcctctattctgtggtaaaaaacatgactcagaatcaaagcaaacaaggctctacatcatctagcccttgcttaacacccaggcatcttgctctgctgctgtccttcttgctcactgcactctagccaaaattggtttcttttctgctcttccctttttagggcctttgcacaggctgttcttctgtctggaatgttcttccactttggtacttattgaaccaatatactcatcgtccaggtctctgcctaaattttcctttctctagtaagtcttccttggcccttaagtgaaaattatatctttcataatattttctttatcatactcttcaaaaaattatttttaacttgtatgctgtcttgcctaatgcctgtctttgcccctgtgtgagcaaggaccatatctggagtgttgaccactgtgttccctatggctagcacagtgcctggcacatatttgatgcccagtggatattcactacagaatgagtggatggatggatggataaattgaaacaactccaacctgggagtcaagagacctgagaacttccaggtaaatgtagtattagaaaattgcttcatctttctgagtctgcacctccgtacctgtaaatttttgagaagatatttttcatttctaatattccaggactcctgcatatgtgctgagacacaatgcatctgtgctaagacagtcccttccacctctgtcaaagttggtgcccctttaattgagtcatctctgtaccttttatgaacctattaccactcaatcatatacatttttgaacacaaaagtctgcatattgcctttttcagcttaatattccttgtagatcatttgatatctacacctacagctttagctcaattctgcacctcccccatgactgcttaatcgtatatgctattataccatcatttatatagccagttttaggcccacaactttatttttattgattttttaatgtttttatttagaaacaatttcagacatatataaaagaataacggtgcagataattcctgtatacccttcgaattttccaaattttaacattttaacacatttggtttatcattttctatctttttgcttcttttagtctctgtctctctttttcattacgtataatatatacacaaatatacacatacatacattataaacatgtacagttttgcaactatatgtatatattgttttataattgtttttctgaaatatttgagagtaaatttcagatatggtggccctttatttttttttcttttctttttttttttttttttttttgagacagagtctcgctctgttgcccaggctggagtgcagtggcgcgatctcggctcactgcaagctctgcctcctggattcacacgatggccctttatttctaagtacatatgtatttttttaaactcaaggacattcttttacacagccacagtatgcttatcaaaatcagaaaaattatcattgatacaataccagtacataatctaaagtgtttattcaaacgtaccactagtgtaaaaagaaaaatgtttttcctggtctgggatcacatgtttaggtttatttctaagtagctgatcatcattgctgtctgtaaatgaggtttctctgccacaggccctctaactgtttatgcttgaatatatgaaggctatcgatttccttgtgttaattttatattctgctaccttactgatttcttttattgcttatttttattattggcatcctaggtatgctatcatattatatgcaaatacaggcagttttactttttttttttttttttttttgagacggagttttgctcttgttgcccaggctggagtgcagtggcatgatctcagctcactgcaagctccgcctcccgggttcaagcgattctcctgcctcagcttcccaagtagctgggattacaggcgcccaccaccacgcccagctaatttttgtatttatagtagagacagggtttcaccatgttggccacgctggtctcgaactcctgatctcaagtgatctaccagcctcggcctcccaaagtgctgggattacaggcctgaaccaccgtgcccggccagttttacttctttacagttatgcttctctattgtctgattgcattggattaatgccactagtaaaatgttgaatagtagagaagataaagggcatctttgctttgtttctgatgttagtggaaatccctccagagcgtttccattaagatcctgtctttatgactaaggtagatagacagagatgctagatagatagatacagattgattcacaagaattcatgttgagaaattatccttcagttcctattgtcttgagtttttttattaatcaagaatggatactgaattttgtcaaaagctttttcagcatctgtagagatcatcatagactttccccttagatctgtttttttgttttataatttaaatggatttcctaatattgacctaatcttgcagtcttggaataaatcccatgttgttttattttcttaatatagtattggatactgtttgctaatatttcatttagcatttttgtgtcaatattcatgaatgatactggttgatagttttctttctcatactgtctttatcctgtttagtatcaatgttatacttgctttattaaaagaattagggttggttccaagtctttgctactgtgaacagtgctgcaataaacgtacgtgtgcatgtgtctttatagtagaatgatttataatcctttgagtgtatacccagtaatgggattgctgggtcaaatggaatttctggttctagatccttgaggaatcgccacactgtcttccacgacggttgaactaatttattctcccaccaacagtgtaaaagcgttcctcaacaaactaacacaggaacagaaagccaaacaccacatattctcactcataagtgggagctgaacaatgagaacacatggacacagggaagggaacatcacacaccagggcctgttgggggttggggggcaagggaagggagagcattaggacaaatacctaatgcatgcggggcttaaaacctagatgatggttgacaggtgcggcaaaccaacctggcacgtggatacctatgtaacaaacctgcacgttctgcacatgtatctcagaacttaaagtaaaattttaaaaaaagaattagaaattcccctccattttcaatgctctggaacccatatgtacaacatagtggctctctggtttttgtaggctggaaacggttctcctatgaaaccatcggggcctagaacttttaggtagggtagtttattaacttaaatttttttacaagctgtacatttttagctgtttcatttatattttaaaatgttgacttttaggtagattttcatatgtttttttcctagtagttacctttgtacttacttcttaaatactacttagttccaagtgcttgtatttaactttgtaaaactagtttatcaattttattggtatttcttaacttacacttcctgcctatacaacaatcaatgtgattattctacttttttttcctgcctcctttctctttccagtttttagttgcattatttctactttgtcacatacagcatctgggtgctaaatgtctactctcttacctgcctctgtgtgtgtgtgtgtgtgtgtgtgtgtgtgtgtgttcactaccttttaattttgttttttctctgaagtttgcccagtcctctcttggctggagtttatcttccaacagattgctcaagtagggcttgtggatgcataattccctgagttcttgtgtgttgaaactgttgttttacgtacttgacacctgaaggcaatctgcctggttttgaaattctaggttcacaccttcttttcctggaaaatgctgtcccattgttgccttgctttctatgttactttttttttttttgagacgtctgatgacagttaaattcttctcatcttataagttatttgatctttttgtttaaaaggcttgagaatttttttctttctctttgaagtcttggttttgctaggacatcagagttgatgattccgagtacattttccaggtacctggtgggcttttttcatacgtaccttagtgtcatatccaagggagattagagcccccccttaggcatcttgtacattagtcctcattttgtctttttctttcatttctttctcaagttcaattaattctttttaaatttttcctttctgctggttgtttttaatttttgaatttctgttttaaaacttttttttcttaataactacaaatgtgtccttaaggctgtttaattcatttccaagtattgtgttagattttctcctgcttcatggttagttttgcgtaattttgggagaaaattgttgtcagtataggagtttggatttggagtctcattttacatttttaacaatagattagtatatgtttattcatatttttatccctttaaaaatttatagctgtatatactattcgtattttaaaaaggcatcctcttctattagtacaaaaaatacaattttattaatggatatgatggtgatgatgatgatgaggaagtagttatgtgtcctctgatttttttggtcctctttcgtcttacaggatgccactactccccacttctatgcctccttttctttaatgaacaatctccagagtgcttctttccctattttactttcttctcattcagaagactgttactttgagttgcatgtaatcaatactctgacctaccaggacacttttccagtattttcatacttaggatgaacttccgcattccgacagtaggtttttttgtttgcttgtttttttgttgttttttttttgacagactctcgctctgttgccaggctggagtacagtagcgcgatctcagctcactgcaacctccgtctcccgggttcaagcaaatctcctgcctcagcctcccaagtagctgggactacaggtgtgtgccaccacgcccagctaatttttgtatttttagtagatatggggtttcaccatgttggccaggatggtctcgatctcttgaccttgtggtctacctgctttggcctcccaaagtcctgggattacaggcatgagccaccacaccgggtcccaatagtacttttgatcattcttgggcctgctgttatttcacctcttctatcttctacctaggttattttttttttttccagactgtcttgctcaccacaaggattgtagcaggagtggaaagatcacttgctgtatatttttttcttattttattaaaagtaatttaaaatctgggagttttctgttttccagttatgctaaagacacagctaggaataacagtggtaattaaggctggggctgtctgattataatgttttgattgtattttacaacagaaagatagagtaggagaaatggaatgcagctctgttgaagctgctcatatgaaatgaaatctgccttgtccggctacagtgcctggtcttatgtgtagtgctgtatttactccctgaattgccaccaagtgtgagaaaccctaaccagtaattgactgtactaatcaatattgagtgtaggactcaatattgtgtcactgacaagtatggaattatttgactatccattgtccattttttaaaatttttgtttgtttgtttcttttttgagatggagtctcactctgtcacccaggctggagtgcagtggcacaatctcagctcactgcaacctccgcctcctgggttcaaacgattctcctgcctcggcctcctgagtagctgggattagaggtgcctgccaccacacccagctaatttttgtatttttagtagagacagggtttcactatgttacccatgctggtctcgagctcctcacctcaggtgatctgcctgtctcggcctcccaaactgctgggattacaggcatgaggcactgcgcccagcccattccccatttttttagagtagcagatgcaggaggacaggaatcagaaaaacgtttatggaaatgttgagccatgcagaaggtaagagattttagcaaatgatgatgtaactctccaggcagaaaactagataaattaaactccactgtcaaaggtccctgagaaaaattaaatctccataactaagggttttattttagtcttcattctccttgctattttttcttcagaatgtgatactatacacttcccactcttgcttgaaagtcatttctcatattgctagattacagtttcttttttactgtaccttctgtatcttcttttctacagagtttccttccatcactccacaaatatgcacattttccaagctcttgttaaacctctactattctctttcttaacacttttccttaaagaatgtacttacttgcatgactcttgggcatctctctcagccctgacctttttgctgaactccagtaataaagctttttagcagagaagtggcactgagagtgggaaagggagaaactgacgttcgttttctgccatctctcaaacccagcatctcctaaggtgagtcagcatcttctctccaaaaccaacttctttttgtgatgaaaagtcattaacattgtttttctctagttgctcaagctaaaaccttgaacataacttctgcttcattcttttgatacacactccttgcccctcatccttgttctatggattctccttcaatacatcctttgacttttttgtatctgtccattcccccagtatgagcttctgtcaactcatttccaatttaatatagcagctgcctcactggaatccctgcctccaccctctctgctctacccctttgacaactgtctattgtcaaattaatctttcttcaatatgactttcatcaaatcatacttctgatcagaatcttgtagtggtttccatttcctatatttctttcattttctaggcattcaggttgttccaccttcagagtcattctgattgtccatatgtgggtagcctgcctggtgtacttaatctttcacagaatgcacaatagtttttctgcatccataaggactgaaatgtttttcaccgacttgacttttcactcacttactttacatactactcatactttatggttctatacaagtcttgcatttttctgtgtacttcaccctccacgagttttctccacacctgaatcctggaacagttcttgtctgtggtctcctagtctttaaactgtttgttgctttataatgttgtttagttatttttgcatatatgtcatgtgtttctagtgggattgttggctctctgactagactagctttatggagcacagagactaggccttacctgggaactctatacctaatacttgtttacattattggcatcttcctatacctggacacttggccttattccagatatgtaagttttgtttgtgtgtttttgttttttgaaatggggtctcactctgtcacccaggttggagtgcagcagtgcaatctcccctcactgcaacttctgtctcccaggctcaagtgatcctcccacaccagcctcctgagtagctgggaccacagacacatgccatcatgcccagctaacttttgtattttgtttggtagagtcagggtttcaccatgttgcccaggctggcctcaaactcctgagctcaagcagtctgcctgccttggcctcctaaaatgctgagattataggcatgagccaccagcctcagacatgtatatatttaactctgattttagaaggagtttttggaatttttatgagagagttcggaagaagtcatcttagacccaacttcatgtaatggggttctatagtcatcacaatagtaggctacactggaatgagagcaatttaaaaatttggtgtctggataccaacaaagatttatttatttttctcacactaagtttatagccgatatggacaatcctttaaagcaaatatcctccatgtggtacctcagaaatttatactaacggaggttctgccatcctgtagctgcacagaacatgcaacctcccttgttgacacaatcatggagtgatatgctgtagtctctacatcaggtctacagaggggctcttaatctttctccagatttataaactacaaatctataaagtaaaaagtcatgctttcctccacacatacgcattgcagtagaatagggacagggaaaccacaatgaacactccctttcataaagggacagaagggaggcacgcagcaggcactggtccttagcaattttgaaatttcttttggcagacattgtaaggggctcctaacttggggtggagaatgtttgtgattaggctgcagttctactctctgaaggggcttccttgtccattgtttagcatggcccctagctccaccatttaggaggttccttattttttattatccttcctggccatacttcaaatgggtgttggggaatatatcctccttaggaactacacggctttctcagcccaccaacctgccatagtcagaggcccagggattgtttaaagtcctggagaatatcagggtctctgttcccttggcagtttgtgtaaaaaattaggtttcttatttgattccataataattctagatgttaatcaacatacacagttcttgaaatatagttctccaaactcctgtttcctttgctttccagtcccttacctcttttccacttaatgagaggcattctcagcctatcagcctttgtaagggaatacacccttaggctctttgctctgagtcactttgtccaatctaactattaaccttctcagctaatgtggcagaggatgaggattatagaaaatggctcttaaatgtttttactttgacttgatgcatgtgacatccatgtgtatgtcattggccacagcaagtcacatggacctgccaagtttcaagagagcaaggaaacatattctttcatgcactgggatagaaagaaagccaaaacaattagtggatatgatgagatacatcacttccttgtggaaactgtgaggcactgaggcaggcctcagcgagggaaccagcaatggtgtggaccagaagatgccaaaaggtgtaggttctccctttgggccagggtcagacaaatagctgaagcgatggtaattgcacactgtggaaataattctggtgctcttcgtggaaccttctgcaatggctgcctcatagcctctcattctttgaccttggtaccctgaagcacctttgtcatggaggagggttgaaggaaaattcttccccatgtggcttgggatcccagagagccccttgaaagaccacatttcttggagattatgctaatgtaccaagggatatccctaagacttcataatgtagcctactttaatttccccttactttagtgagaatcctttccaataaatgtacatgattagaatcactcaagtttttagggagtaattgctctcaagactcagatttgatagggggaggttcaaaagccatcagggaacaggatggagtctgagcaggactttgtatccttcatctctttgcatggatgcaaatactaccacagagccactacactgcaaaaaagtgctgggaatctgattgctttgttgatgtattttattctgcaattgtcagattcagggacccaccctggaagtttttctaggggaacacaacaaaattgctggccccattattgatgagatgggttcttgggagggaggtcgaagacttagtgactccacatcaacacgggctctggaaacatgcaggcaaagtggggcttgcctaatagtcaagactggccactgggtgggtgtcagcatggcatggtggaaacaggtgctggcgcttagccagcctcttctttgttttgattaatttgtttctcttttgttttatggaacttgacggcactggtggtggcttttcgtggttgactacccctgtagtacctaattacataggatacttttaaaaaagcaacaatgaacacattttccaaatatgttctcaatcgcctccctccctcgataattggaggcagagggaaaagagggctgggtggtgttcctcagagacctcctgccagtcagcccaggcatgtccccatggggccactcaggaacacagttgcttggatgccccatggaatagagggctcagacatgcccagggccctgaggccacaccccaagcacatgaagctctcacacctgctgtcttattcctgcacatgagggctgaggtactgctcaagaactaggtaggaaattacacatttcaactaaagttcagtcaaaataaaaatatcaggcagcttttagggagatcaaagccagagactcagtaaaagctcgtgatgcaggcaattctgaaactcctgtctttgctcttttgaattaaaagaataattgcaagaaaaataacatatttttatttattcattcgttcaatctgtgacttgatcctgtgctaggcactgagagagtctattggcaagaatctgactgggcagaaaatggcatcgggagacgtgaactggaagtccttatctggcccactgaagactggagtgaggggggagacagtctagggacttcatgcctgtatatcccaagactgtttgtctagacaccaaattgttcccagctccctcttaatggagacagaggaaagaaaatatctgtgggttgtggctgactcacatggcaatttccttctgtttgactgaccacccccatttgccctctcactgtttataagggcctggcactctaccaattatagactgcaggccaggtggtgaaggaagtcagtgtgaggcatgattcacagggactcctgaacaggtgaaactttcctgtaagaatggaagaacgcccaagcacacacagtaatgtacactacacccccacgtacagacgagtgcaaggagatttaaactccgcgccttgactttccttcctggaggaccacactgaagttgtgagtcattttacaacagaaggatgacctcgcctttgggctcatatattatcttcatctgttgactctgctactacaagaggcaatgcagccctccaacagatgccgattacatagcattccccttctcagtgtggaactccctttatgtgaaaagaagtactgtctgcctccctccattccctgatttctgcacaagagcaatcttacccaaaatcccttcatcttgggccctctgttcaactttatctgcagagcgagacagtagtttctgaccccagttgcaaatctgactcagcaaaacttaaaaaaaatatgcaaaaggaaggccctatccaagacttcctgaatcataatctatagaagtaaggctatgtaacttcaataagcttccaagataatcctgatacacaactgtgatcagtgcttctgaagatgtcacatgcatttaaatcaccaggggatgttgtcaacatgaagattttgatccagtaggtctagggtgcccctgagatgtagcatttctaacaaacccctggggctgcttctggtcccggagtaaatttgaggtagccaaggtgtagagctatggttctccatcccagctacatgttagaatcacctggggaacttaaaaaaaaatccctttgctccagctgcactgctaactaaatcatacttctggggctgggactcagacatcactaatttctaaagcttcccaggtaataacattatgcagctctgggccaggcgcagtggctcacacctgtgatcccagcactttgggaggccgaggcgggtggatcacaaggtcagcagttcgagaccagcctggccaacatggtgaaaccctgtctccactaaaaatacaaaaattagccaggcgtggtggcgggtgcctgtaatcccagctacttgggaggctgagcaggagaatcgctttaactcaggagacggaggttgcagtgagtcgagaccacgttctagcctgggtgacagagcaaagctctgtctcaaaaaaaaaaagaaaagaaaaaaaattgtgcagctctagttgagaaccattgttttgggagctgttttacaccagagtcggtctgtgattcagctgctcaactccaaacccaaccacaggcctgctaccttctctccaaaatctgttttccaggcagctgcactgcatatgtttttccagacagctagacagtacatattttcatcatagaagagctcattgaaacacatccctttctagagataaccaatagcagtattagcaaagtctatacatccaccctattccctttgcacagaaaattaattctcagttgttggttaatggcttcttggcttctctgtctctctcctggagcaacctgcatggtacatttacacaaccacataggcagtggtacgtggacacaccacatgcatgagattaacctctcactcacacatcccctctatcttccactttttgtcattttatactccctggtccttccctaagaacactagggaattaatatcatacttctccacctcttccaccttcttcaagtcatctgtacctctgagctcttgcacactgtgcagcattgctcagactgtcttaactcgccagtcctcaccagaatatcctaactcaccctgcgaaatggctggttcccacttgtctttcagctctttctttcttgcctttggacatcaccttcccaggcaccacaattctcggcaactcctctttgctccgtggaaatgtctactataatccttagcacgttgtgaagtatttattgatttctgaatctcttttccccactagactgtgagctccttactggtgggagtgtcttgccaatctctcaatctataccacaatgctactttctgagcacaatgcccagaacagagcagcaggttacatgacattttattgaattaatcaatggtccctctcctctttttttcctgctttctctattagattgtataaaatgtacagaaactgatctgttttagcatgattctgactggcatatttgctcaaactagtccacaccccacgagagtataattggaatatccagtccttccaaaaccctgtcaatcattcttctgtgtaaataggcacaggtgattggttctaatcaaagtcattagggtggttctggaacgatcctgctgccatatgtagataattatggcagaagtctaaattttggatgttagccaatctaaatagcattagcatgaggaatttaaatagaacaaaaggagaaggatggcacagtatttggacataaataataatagctagcacttatagagcgttttctatgtgccaggcactcttctaagtactttacatatattaactcatttatacaacataaccgtcttacaagataaccactattagtatctgaattttataggtgaggaaactaaggtacaaagaggttaggtaacctggccaacatatacctggtaagtggtggagcctcttttgggaccaggtagattaggagctccaggtctgtgttccccatcgctgtggggaactgtgctctagtctatgctgccctagtgaatgggcttctttcaagatccagcataatcaaatttctcagacctaactcgaccccggaagcagaatggaccatcagggttctctatcttattgaagtagcagtcctcaaagtttagcatattgttttttttttcctttttctctctcttaaatatacacacatagagccatacccatctcttagaaaatagacacagggactttcaatagctaacttacttataaaaacaaagtaattctgaatgagagcaatgctgttgtgttcctcgagttttgcttgcttttggagataagactggggtgctggaatgaggagttcggttgatggtttctgagtctaagactcctattaatgataccactgttagtcattatttgacggctcctttttttggatctaccagaaacctaagatccctcctgtgctctctggggatgtggtccaaccccttggctttatgaggaaaattagagagctccctgtgtcacactggaggacctgcctgtgaaatgcgtctgtcctcatcactgcagttttcaccttttgtataaggtggcttcattggtgacctcacatttgaaaaaccaagagttagaatcaatatttctgcatggtcatttcttccccgacaccatcaaatgaatatgatctgatgtgcctggaccagataaacacactgcctcttcccatctctgaagccagagggaaaagctgggagcttgtgtctttaatgaagttctctacattgctaaggagaagtagagcagactgtacttcttcgaaaaaaagttagcaagaaaagaacttcacaatagtttctatgttctcactcctccttatgccacatgggaaactattagaatgtaattaaaaaaaaataaaagtagtatcagtatctctaaagcagtggttctcaaagtgtggctcccacaccagcagcatcaacattccctagaaacttgttagaagtgcaaattcttgggctctatcccagacttactgaatcagaagctctgggggtgggatcagcagtgtgtgttttaatatgccctccaggtgattctgatgtgtgccaaagtttgagaaccactgtcataaagaattaagacatttaatcaaaacatgcttcctaatatatgaccgtaccaaaattgatgcagaggatacatcatttaagtatcttgtcctcaagggatatcttaactaatgctacctagaaatgtagttctgtagcgggcatgaagtgtcatccaaattgtaagaagctagacataaactgctgggatattgaagccatctattcattgccaactccagaaaaatgcctccacaatgtattgactgtcctttgcccattgatcaaggcaggtgggatgtggttggaggttgatgattaattcaggtgtttcttacttgaagagctcagctgttccccttgctcacagctgccttattgacgtgatgatattaaaactgtgaaacttctgaaagctaattcaaccaactgactttaatcaccagggtgataggacacaccaagacactataaagactggagctttggtcaaattcaaatgttattgcttttgactgggaacgttgcaagacacacagagcaaatggaaccagcacagtgtcatctttaaaattagttacaaagatcaaaacgttaaaaaactgaaatgattttttcaagcataaaaatttatcctctcagaaataattaatttgataaaattacttactagatccatgtatcgttgtgtcattatagctgcagtgtctaaaataaccttagcttttctttttgaagaagccagtacaatttctaaaagacacatacctaattaagtcagacagtaactaacttgactttccaatgttgttctatagagaatactagttataattatcttttccccactttcccccccaaaattggggtatggactcacatgcaagattaacaataaaatagaaggtcatcaaactcagaaggaagcaatattctagttcatggggctcttgtccagtgttgtctgtattagaaaaagacagtgtcgggccaggagtggtggctcacgcctgtaatcccaggctgaggcgggcggatcacgaagtcaggagttccagaccagcctggccaatatggtgaaatcctgtctctactaaaaatacaaaaattagccaggagtggtggcgcttgcctgtagtcccagctactcaggaggctgagacaggaaaattgcttgaaccagggagatggaggttgcagtgagccgagatcgtgccatcgcactccagcctcggggacagagcaagactccatctcaaaaaaaaaaaaaaaaaaaggaaaagaaaatgacagtgtcatgtctgttggagaaagttaggagttcttgggatatcatctcaaccacatacaggtaatatcacaaaggatcagtgttccagggcaagaacttacctggaatagtgccaccaccaaaatttacctggtgagaccattggtatgacctaacatgttgcttctgatacatgcatctttggtcattttccattgcctgagttcagtggcatgaagatgaaaggttatatggagatgaaaagaaaatggtaagagtcataggctcacagaattatttgtgttaatggaagagttcaggtcttgtcatcgttttctgttggcagtagccacaagttgtgagtccagatgcctcccagtcttccaggagtcttaataattatccctgaatctcagattgctctttgagccagccctgactcactgaagctacagttgctagggtaagactaaagctagaagtaataatcaagttggctgcgacctcatctttccagtattaatgccctcaatcaacaaccctcggaggaggttggatgagttatccagttcactgaagcaatagcaatccttgagcatctatcttgtaccagcaggtccttcgcctatgttttctttaattctcataataattctacaaagtaggtactatgaacttctgggtgcagatgaggaaaaggaagcttggagagatgaagtgacttacccaaatatgcacagctattaagtggcagaactagtatttgaattcaggtccaattagagttagggttagggtaaggttgaaccctaaaatctaacttcttcctttggtccttgttatgaaattggatcacactgataagctgccctgcaataacctcgctgactgatagtgtcactatggatattggacgcccccttcatcccttaggtccaggacgccccatgcatccactccccaatctggctggctccaggaatagttcaagacttagtaggttgtcaaagtgtggtccctggacctgctgtgccagtgtcacctatgaacaaattagaaatgcaaattttccagtaccaccccaggcccactgaatcagaaaatctggggttgggacccagaaaatgtgtcttaacagctcatccaggcggctctgttgcataagagctcagaacactggtctagcctgtttcttagtatagatggaaacagtgaaacagaaactcaattctgtctattttttttatttttttattatttttatttttttgagacagagtctcactctatcgcccatgctggagtgcagtggcgcgatcttggctcactgcaaactccgcctcccaggttcatgccattctcctgcctcagcctcctgagtagctgggactacaggcgcctgccgccacgcccggctaattttttgtattcttagtagagacagggtttcaccctgttagcccggttggtctcgatctcgtgacctcgtgatctgcccacctcggcctcccaaagtgctgggattacaggtgtgagccaccgcgcctggcctcaattctgtctattcagcctctcccactcttgatctctctctcactaactttctgtttctcaggtattttagaaatgtaggctggctttgaaggcccacatatttattttattgttttccaaaatcacttttttgtttgtttgtttgagatggagtctcactctgtagcccaggctggagtgcagtggcgtgatctcggctcactgcaacctccgcctcccaggttcaagcgattctcctgcctcagcctcctgagtagctgggactatgggcacatgccaccacatccagctaatttttgtatttttagtagagacaggatttcaccatgttggtcaggctggtcttgaactcctgatctcagatgatccgccctcctcggcctcccaaagtgctgggattacaggcatgagccaccgtgcctggcctccaaaatcacttctaattcactgagggtatcacagattgcccaaggctggcatggagaacctctgcatgttagggagcatcatctgtttccttaacttgctgatgtgaccttgcaggtgattaagattttcgtctgggtagctggagttttattgaccacgcacgtgcattcaggattctaataggtgtgttcaaatgggcctcttccttttattttccttaattcataaatgcctaccaatgtatgattgtttttagaaaaggcaaggtggttttcatttagtttccttttcccccaaggatatttggggaagataagaaaaaggttgtctctgaaaaaaataaggttgtctctgaaaatgtgaagtggttgcttattaatggcaagttgtagtgtaaaagatgagctttgaagatcttgtgaactgggtttaaatatcctttccactttactggctttgagtccttggaaaaaatcattttaaatctctgaactttaattttttcatctttaatatgaagaaaataataccaactagggctgttgtgagaactatatggcagtatagtgaaagtgaagtacctcacacactggcatactgtagtgttaagtaaatagcaaataactattattattggggaaaatggcacagtgttacatactctggagtaaagatatggaagccaccaaataaatgtggcataggtccctcaaggaccacatttatttcttggtaagaaacataaatatgattttcatgttaaaaccaaccaagattctgtttactctcctacatttttgcattcttgaaatgaagcatggttgtgaagaacacttagacttcttcttttttttttttctgagacagagtctcactctgtcgctcaggctggagtgcagtggcgcgatcttggctcactgcaagctccacctcccaggttcacgccattctcctgcctcagcctcccaagtagctgggactacaggcaccggccaccgtgccgggctaattttttgtatttttagtagagacgggggaagaacacttagacttctatgaacttggttagaggcttgtattccgtgcattccaccatccccaccacccctgggcccgggtgtggcctttctttcctttacatgctggcaggcttccaaggaacaatctgggaagcactagaaagtagggctgtggccagggcatgcatgcaataagtaggtagattatggcttaagtggaagtcactttctaacattagtgaagaggctgcattgtaatgaggatcctgccagagatgccatcaaggggattactgggggaaaggcatgactttgctactcctcacacacttcccaactgtaagagcccataggctgtgattcctacccacgtggcttcctccacacacagatctgtggatgggcactcaggaatgagtgaaagcatgtacttggattccataaatcccaggacactatctccttccggcatgtcattctgtgattgccatcacagatcaccctaactccagtcagactttcgatgatacgtcatttcgtgtcagggtagtgttgagctgcaagtaacagaaaaccaggcataaacaaacagagtttatctgccctatagaacaagatgtctgtgttcaccctcatagttgcttgatggctgggaagctccagttatgacattcaagctcagaggccattgcccagacattcaaggaaaagccagaacagagggaggacaataccaccagacaccggcttctgtttctctgtcccttctttactgctgtgtccaaaccaccccagaactggggcatgcaacgaccaccatctacctgaggaggcaatctggctggctcagctggccggttcttctctcatgtggctatgcttggttcttggaggttggcagactggatcagcctctgtgaatggggcaccaggaccacgtgcctctcatcaccccacaggctcacttgggcttgttctggccaagcccaagtgttccagccgtgtttccaaaggagggcagagccatgttccgcttcttgagtctcagcctcagaactggaacattgcgttgcctccttctgttggccaaagtaagacacgtagccagctcagcttttaagaggtggaaaaatagatcccatctcctgatgggaggcgctgcgcagtcacagtgaaaagagatgtgcacccagggagggctgaagatggaggtcatccatctgccagggacttattagcaaaaactaaaactgggaggttggggacttttattctttccctttctcttccttccttcccttctaccttttcctcttctcctctctccttctcctccagttcctcttcctcccctcttcttcctcctctcccctcccattgctcctcctttccctcctctcctccttctcctcctccttatcccttcctcatctttcttctgtactcctccttctcctcctgctcctgcttcttttcttctgaaatctttaccagaccctaaaataaagacaggccagggaagaaaatgctgcaaaacagtattgggacacaccactttgcagtatctcattcttgactttgctaagaaagttattggatggatatccctaccagactctcaaaaacctcaaccctgcttcactcttattggcatatcctgggaggcattcatcttgacccaggcagccctcagaatgccactgggttcctgttgaggcattaaaggggcttaaatgatacagaaactatgcttctattctttccctgcccctccctgccattgaaatgtcagtcatggcaaaaccttgcaaagtacacgtgagtacaaagtggctgctttgcttccctgtggcttttgtagctgtcctcaaaaacacactctgtgataaggtatgaaaggagaccttcaaaaacccacatataataatactctcccttaggatttttacttgaaagtgaaacgatttataaatgacatgtaggcaaatatcagtctggatgcagaaacttgctggccacattggtatttcagtgactatatatatgctgaggctaaagaaggttattattctcaaaagaaaaaaacaggccgggtgtggtggctcacgcctgtaatcccagcactttgggaggcccaggcgggtgaatcatgaggtcaggagtttgagaccagcctggccaagatggtgaaaccccgtctctactaaaaatacaaaaattagccgggcgtggtggcacacgcctgtagtcccagctacttgggaggctgagacaggagaatcgcttgaacctgggaggcggaggagctgagatcgtgccattgcactccagcctggggcgacaagagcaaaactccatctaaaaaaaaaaaaagaaagaaagaaaaaaacaatgaataaactcatgatccaaagttcataagataatagggagcatttattcagcattattatgtgttctggtggtgtactaagtatttgtatgtgatctaatttcatcctcaaacagtccaatgaagtaagaaatatccccattttatatctgataaaactgaggcacagataattgaagttagggatcttcatttggagaatcagtactcaaattcacctccatttgacttcaaacccctgcttctgaccattagaacacaccacattctatttatttataatccatggtgtgaaagtaattataaatgaacctaaaatacaatttatggttcataagtatcagctgacagtcttgactcactgggcttatgtccctgtgtgagagccaaaataattaaaacccaaatgaatttacaattactcaccagctctaatgaccatggtgttgtttaatgaagtagaatacattacttaagccagacgattattgataattttaaaaggtgtaaacaagatctttattaatgaggttgttcattcacaatgacacttacgtctattaaactacattgataggtcgaggctttgctgtggattttgctgtttttccttattgttttgttgttgctgttgttcttttttttgctataggattttggtattatctaacaggttagtgttttccaaactgtatttcctaggagatgacctctgttatgtttgccttagtgagtttgagctgctagagcaaaataccgtagacttgatggcttaaaaaagacattaatttatcacagtttgggaagctaaaagcccaggatcgaggtgatagatccattgtctggcgagggattgcttcttggtttacagataggcttcgtctccttatatcctcacgtggcagagagagaaagagagggagatattatttctctcatgtttcttcttataagaccactaattccatttggggggtgggctctaccttcatgacttaattatgtctcaaaggccccacctccagatgccatcacattgggcatttaggcttcaacataggaatttgagaggtggggacccaggcattgagttcatagcattgctcatagatgtcccatgaacaaaaagggtcccagagtcaagtaaatatatataatgtaatattcattaacatttaaagtatatttgtttgtttactgcaaggcatattagagccttttacacattataatctgcatggtggatctccaagacggcagtattattttcattgttggccatacttacttgggatgatgtgaactgcagaactattcagtggctggtccatctcatctcatagttgttggtcgaaattcacaaatgtctgcagaactgtatggatctcaaaatccacttatgaatataataatgtgtagtgcattttaaaattattcttagccttctaaaaatgattgtcattttgaatgaaaattacttggattttaaagatttaggactttctgtatttagtgaaaaataaataaaacataatttatgcgttggcttttaaacaccaaagaatattcattatattctttatgtatattgactatgtcaaaaaatacaacatatcctcacttgaatattacttcagacttctggtctgaagtcagattcaggaaagacatagtaaaactgaattgggggagaaagctaacattttgggagtgtttacctgatgtaagtcatttttatgtctgacttaaccctttcacaaccctttaaggtaagtattcactatgcaaacacaaaatcttcatcccagagaaatcaaaactaagtttacacagatagtaaagtgagagtcaggatttgaacccaaaaccatctgactcgaaagctcatactctattattttaaaaatcaaatgaaataattaaaataaaattatatgaaatctgccatttgaaaacagatatgactggcaagctgacaacaacaacaacaacaattatattacttccatgagacagaaaatgctaaaaggagataacagttcatttatattaaaccatgagtggtgactgaggaactagtctgttcaccagagtctaaaatgagggaatataagtttgactgggttttttcagaaagatcaaattattaatgaacaaaacaagtaattattaaccaaattaccaccaagaaatggttgattccgaaaacacaagtaggttgaagaagtaaatggatccattactgggtaatttatgtttcgaattttttattcaagattatgtaatacaccatcctcactggcaatgcaccctttattaccacccgataaccagctagatggtgttttgtatggggagcacgtggcctcaccctggggttctgacaatcacagtggacattctccaggacagcgctggccttttggagatcggggacaatttagagatgtaatcttcacttggactaagatttagctaagatgcagccttctgatgcaggcttcttctcctgaaaacagctctgctttacaacatacaaaacaaacatagaaggctgctttggaccatcttctcagcagagccattgctggtagttcggacatggtaggaacagagcttctggaattggagctagcattggagccttattgaagcaaagtgattaacatatcagaggtcaggatgtatgtgtccaactgaataaattctgtccccattgttatcagataagagatctaggaaaatgcttagtcgatctaggaaaatgcttagtccgttttaaagggaagttgataaggagatgtactgaaggtacttggtcagttttaaaagaaggtaaaagaagtactcaaggtacttggtcagttagaagatagtaagaagaaacacacattagtgtatcttgtgagcagaggtacatgtggaatacacctcacatgtgttcttccctaaccctcaaacttcataacaaatgccttccaaattttagaatcagaacagaatatgtcaaaagtagcaccaaaaaatgtgaaaagtaagtaatggttctttatgctctgtgggtttatttttaattgttatgatggagaattttttttaaaaaaatcttggtgtccaagttttgatggtatatcatttgtcccatctctacttggctggaactgtgctgtctccactccatacagggtaagtcatgttatcatggtggatatttgatcagtatccttctttttcactccattgcattgtcatgagagatttctttgttacatttcttcccacttaccttcttgatcatctctccttacttttttgttatttttttccttctgttttcattctgcaccctgcccctcaacagcacttggcttgattcctagcttcaccacttaatggcgatgagatgcttggcaaccctcttaactaacaccttggagactattttctcatacataaaagggaaacagtaactctatccaccacactttgcaaactgtaaagtgctatctaaatataagtttagtatcatggctatcattgccctatccctaccttccctgcattggcgtaagcatattcctggataagactgtccgtcatttggtttgttgaaaaggctgatgtgaaaggaatcacctttccctgccaccccacctgcctactgctgtcatcacattgttgtatttataatgaatttgttcttttctttcttagttacttgggtcttgtatggtctgtggagatcattttatttctattccatttccatctgctcaccagtttgtactaattgaggtgctgcctgtctttccattcctctgcttacctggcgctaactgagaaactaatctagtctgttctttccactggaagatgagaggcttccaggaaggtcaagaatatgtgattaacatggacacaggaaggggaacatcacacactggggactgttgtggggtggggggagcggggagggatagcattaggagatatacctaatgcaaaatgacgagagttaatgggtgcagcacaccaacgtggcacatgtatacatatgtaacaaacctgcatgttgtgcacatgtaccctaaaacttaaagtataataataataaaatttaaaaaagaaaaaagaaaaaaagaaaacaaagcaaaacaaaaataccaacaactgtcaatgtatagttcctttcttaaattatatcctttaataaatataaaattacagaaaattaaaaaaaaaatgtgtgattaagtcactaggtttaacaagaagaaaggacaggagagataggcactgagaagggaaaagttttaggacaatttggagggtgttggggtaattagaaaaaattcttcaatgttataaattcactaaagagatgtggttaaatttctgctgtagttagattacgttgagtgaaccgttaggagtttaggcaggcagtggaaatgcttttgtgtggctcttaaaaacagcatgcaaagatttcttgaataaagatagccaaggaatgtcttatttctatgccaaaccaactgtaaaaataagtaccccaaaaaaggtaagctgtacatgtaatcagataaaagcattccttggtagggagggggtacagaataatagaagtgacaatgaactaggattgggaagatcatcctttgcattccatttccaccaccttttccctggatgaccttgaacagtaataacaatcatatagtgctcttcaaattattttgcagttttgtgttcatgatctcatctgaacccagccatggttccaaaggtgaaatagaagaagtacaaggggctgggtgcggtggcccacacctgtaatcccagcactttgggaggctgaggcaagtggatgggctgaggtcaggagttcgagaccagcctggccaacatggtgaaactctgtctctactaaaaatacaaaaattagccgggtgtggttgtgggcacctgtgattccagctacttgggaggctgaggcaggagaatcacttgaacccagaaggcagaggttgcagtgagccaagattgcgccactgcactccagcctgggcgatagagggagacaccatctcaaaacaaacaaacaaacaaaaagtacaaggaattcatctgggcttaagccctgcccccgcgggactggttgtataacattaaagaggccatcaatccctgtgatcttcgtttgcccctattcatgtaaaacattgaataaagcattcccacatggttatgtggaggatgaaataagaccgtgcctataaaagtactttgcaatctccaaagagtcacacagcagtttgtaggattttatgaacacaggagaaattttagatcttccagtggtagagttttttgttcctacaagagaaactaagttaagcagcagaggcacatattggaataacaccacataggtcacagcctccgcagcaataatgaaattccaggttcaaaaaagatgcaggcattaatagaaggaaggggtcagaactgaatctgtaacacgccacaggaagggtgaggttgggcaccgctgttccaatagctggcccctttgtcaccgccactggccccaagaggagatgacactgccaccatccaaatgaactccaaaggatcacttgccttatagcgacattggctctagattcaaagtccccgggggaaccagtcaattggctaagattagattacctgcctacactctggttaccaggatattgacagagggtatgtttgacccttcccagcttccatagcaggaggtaggattctgtctcttaactttcttgggacttctcctcacaggaaaagaaagggtactcagatatccatgtcaggactgtatgggctaaatggcctattcaggagacacagattattgctggcgggactgaagcccatttctcctcatcccagtctcctagacctttcaccattttatgtgccttcatttcaatttgttcagtcttgtagtggatattgaatctctcctgtataccctgttctatggcagcgttcctctacctctcatattctgagattttatgattaaatatttccatataacattttcaggtgataaagtactgtgttaagaacattgttttcacaatgaaattttagagagccttaaatttaaaacaaagattactatcagacaaatcctgcagattcagcagaggcatggctgaaaaagataatttgttcaacaaaaagaaagaggaaataacagcaccagggggatttcttgggccccatcaatgtctactgttaaagtttattatataaaccaaataaggggttgtacagttcaagggcttacagctcataccatgaatctagaggctggtccctgcagcactgcctaggtcttgtactcctagccattaccattcgctgtctccattttacccatatccagcacgaagacatgatacaccacgaggtgggaagtgtgcaagctttgagagtctgttcaaggctgacatccatataaaataaaaatggaacaaacatacttttgcctcagaggccttctgtcttccctcagttgctgcctgattagaaacaaagaggagttacaggttccagtaagatagcaaatcctagtctgagtttctttgcaaatggagcatgaggcagattcttaggtgttaagagtagattggagagtatgactccagaaaagccagagtgtagaaaaaataggagtgagtcagggaaggcagaggagcaaattgaaagggttatctcacagcttttgtaataagcacagttggttgctcagtttctcaggatgttttcaaagaggctgtctgaaaccactgcatctttgaatagtccatctgaggggaggaggggagaagaattattatgtcagcgcttgtctccctttggccaaatttattctgtgtgacgtcaactctcttgcacttttgggtttacctgctagcctctccggcagccacctgggaagccagatcccaggatagtaaggctagcacctgtgacatatgccacactctcaggctgagcatgtgatgaaagcaagcagtggcattccccatcgctccacctgcagcctgactgggctggtggggcaatgaactgcatgagtcaagagagccttacagttgtcacatgcctccggagcaacaaaaatgagaggcaagagggatgcacagggaggtgcaagaccatacctgtgagtgacttgagggacctggacaagccactaccgagcccagtcagctaagccagtggaataccaggaaggagggctcagagctcaaccaagattgagacattccccctgtacctacaagagtacatctaggccaggtgcagtggcttatgcctgtaatcccaacactttgggaggccaaggcgggcggatcacctgaggtcaggagtttgagaccagcctggccaacatagtgaaattcatggtagtgtatctctactaaaaaatacaaaaattagtagggcgtggtggtgcacgcctgtagtcccagctacgcaagaggctaaggcacagagaatcgatggaacccatgaggcaaaagttgcagtgatccaagatcccgccactgcactccagcctggggtaacagagtgagactctgtctcaaaaaaaaaaaaaaaaagtacatccaggccaggagatcttcacagacttcacagagacttgtcagtagcctcaacaggaaaacatggccaagggaatccaggaaggagcatgagctgggttagatacaccaagatagcttgaaatcccttaacctatgcacaccaaaaattgctaggtagattaaaacgcatggctacagtcactagaaagaaggggaaattcctagattccaggaaaaaaaaaacagagggaattaaaaccagaccagtaaatgtctgcatgggttttgtagctataaaaggagtgagtgcttttgatgccaataacctacaggattagattttatttatctcccatatagagaaaagacacaaaattttggacctgagcaaagtgggaagcataaaacaagaaccctaaaaggattgcatttctgtgtaacatatatgtatgtgtgtgtgtgtgtgtgtgtgtgtatatatatatatataatatatatatatatggcagtaacatatatatatgcctgtaacatatatctatatatgcctgtaacatatatatagatagatagatagatagatagatagatagatagatagatatatgcatgcctatcagtgcaaggcagtgacaagtaagagctctcgctaactgcaactgtttggggaaaatttttttttctggaaatcaaacccagggctgcatttcttaaaggtctcaagtctgatttttatactgtcaggtaaccatcaatgtcaaagtgaaaatatatcataaaagaaataataaaaaaattgattctctgacagtgatattcccagggtgctcagtagaagcaaaagcagaaatatactagaaaggcaagccacagaatctctgaaagaaaaaagaacgttccacaaaagatcagttcaccatacagccgccaaaactgcaaaataagtaagacttctagcacttgaacagaagaagctgaaaaggaacataaaaagtgtatttaaaattgttgaattgtaattcaataaaaatgtaaagaaagggattcaagctattaataaaaaaatgaagatcctattaaaaaaaacaggtaactgaaaaagaaccaaatacaacatctagacatgggaaaagtagtaaataaaattaaaagcccaaaggatagattaaggaatggattaaacactcctggagaaagaattagtaggtcagaaaatatatgtgaggaaattagattgcaaagcagcaagcaagtataaaagaaaagattaggctaaatagtttagaagaatgtgtagatcccacatatatctgataagagtttcagaatgaaaggacacaaaaagaatatggaagaaacagtctttaaatagatgatggtagagtagttttcaacattgatgaatgaccatggaggaagtgaaataatcaaaatccaatgtcacatgtaacattttaaagcagatagaaattaatgataggcttcttacatagaaataaattcagactggcagctgacttctcaacatacacgatagtgccagatgatgctgtgatgaggcaaaattaccatcaacataggattttgtgtatgaaatcatcatcaaccatcaatttataaccagctaaactatcattcatgagatgacaaaatagatacattataacacaaataaagactgagacatctacctccatcaacataaataaatctcaaaacgtaacaccgagaaaagcaagctgcaacaggatatgtacaatactattggcctgcaattataaagcccaatactgaagtatcaactctttgtgatttaaagtgcaaagcacaattaagaaaaatacaaccacacttaagatggtagttattgctggataggatagaagggaaggaaaaagcaatgggacttcacctgtgactgaaatgtcttatctttttttaaaataaaaaaaaacaggccaggcagggtggctcacgcctgtaatcccagcactttgggaggccgaggcaggtggatcacgaggtcaggagatggaaactagcctggctaacatggtgaaaccccgtctctactaaaaatacaaaatattagccgggcatgggcgtggtggcgggtgcctgtagttgcagctactgggggctgaggcaggagaatggcatgaacccaggaggcagagcttgcagtcagcagagatcgcgccactgcactccagcctgagcgacagagtgatactccgtctcaaaaaaaaaaaaaaaaaaaaaatgaggaaataacaaaatattaacatttgttaaatctagatgtaggcacatggtatctgtgattttctgttctttttatgtgtctgaaatctttcaaaataaaaatttttaaagaaatatatctacatcaaataggagagagaagaaaccaaggagaagcaagagaaggacaaaagaggtaactcaacatggtaagctcttgagggtggttggaaacaaaccagaaaggtttgtttccaacccttgtagaaaatgagagcccatttcaattttagtgggagggggtgacaaagagaactggatggccaatctagatcatgctcccctctaccactaagtgcctatgtgagcacaggcacagacttcccctccctggccctcagcttcctcatcttatagttaatagggttggcagtagtcattctaccatatcatttccatttccagcttttgttcctctgcctccaatttttcagatagccacattttcagacattaaaaatgccttttcactaataaagaattcctttggcttcaagtgacagagaattcagcccaaattggcttaattaaagtgaaaaattattggtttatataagatgaaaacctcagggctacatccagttttaggcaacactagatttggacctcaaaaatactatcaagaacctcaggtaattttaaaaatattttgtactgtgtcttcagttacattggctttcttcgcggacatcatgtgataagccagatggtggttgtagccagatggcaatggcagctccagaccttaaatcccctaagttttttgtactgcaagaaaagcaaaaatctcttcccctgcagccccagtgcaacacccattgtatctccttagcttttatagagtcctaagcccaacactgaaccactcattgtagacaggggagagctatgcactgatcaacttgagccttgaacatgctcccactgtggaatgagcacaaattcacctcaaccatataagctaagagtaagggtgagtgttacctcccacaaggaaaccaggaagtgattaccagaaaaaggatgcatggatattagatggcaaaaacaaatgttcaccaaccagcaaaaacatgagtgaccctccaagaaggacagtctaagaatttcagtctttttcttaaatagtgacagaaggtgaaagggaaatcctaaaagtgccaagcattctaagcatagaaaggggccatgtaagaataaatatctattagccacaattctagcattcatgagctaggcaggagcttatgtagcttgaaagatgtagttttagaatcagtcaaaggcagttctaattggaatgacagagaataatcatggcaagtatgaaccatgtgatgttccccaatagcaaaaatgaaaagtaagtgctttaagaggaagttaagtagatttgtagaaggtaaagcatgatgtcttagcaagagatgatgggtgcagtacacacctacagagattgatgctgtgtaaggcagacaactttgcccagagcacctctgttggaaatagaatatgagattgtgtaaaccatttattgtcacagcactgcaagaaaatattatatttatttttgaaccactctcaaaacttaatacgtctagataaacatcttaataaatttagagtaaatagagattttttacatgatcaatgagcaacaaatatttgttggatgcgactctcacggtgttaaataattctggaagttgcggggagggtaccacatggaaagttggggaggattagaaagcctttctctatccttccatctttatccattgacccagatattccagatcttccactttcattttctcaccttctccatcttgtttttccacaacccttctttgcagaaaacaacaataacaacatcacgttgccatcctgtctccacccctgtaggtactggaaagacaaaaccagaaataacttagtgttatgtttataaattagaaatgtgccccagaaccctgggggtaatgcaaaacttttctaaagttcctctctggtgcctttcggtcagagacacccagaacaacccctctttcgtatgtttgttgttgttgttgttgttgttttgagacagagtcttgctctgttgcccaggctggagtgcagtggcatagtctcggctcactacaacctctgcctcccaggttcaagcgattctcctgccttagcctccagagtagctgcaactacaggcacccaccacaccacctgtctaattttttgaatttttagtagagacggggtttcaccatgttgtccaggctggtcttgaactcatgaccttgtgatccgcccatcttggcctcccaaagtgctgggattacaggcgtgagccaccgcgcccggcccttcctctttcatatcttttcctgttcccttgtccactcctccaccttccagcctaagctttattctgccagtttccatcccaaaccattataccgacaccctcagtgctgaactggccagacctgtctcaccttagaccctcactgctcagggtgaaacatcctcaagttaattaactaattagttaattaattaacttaaaatatcctctgcacaacttgcctctcatgggctgtgtttatgacattacttaggtggattaatgtactaaaggacttgcttcccgcaaaaggtgagtggtataagggccaaaaggaggtggagaggacagaaaacccaaatccaccacatgaatagaaaaaaaaaaatttcacatgcaatgcctggcatggattcatggcaccctgttcttgggtggaggcgaggggacagctcataaatagagttgaactgaattgtgaccattcttggctccagctgcccctagtctactaatttagatggagtgtaattgctgggactagaatagcaacgagagagtatagatactcaccagacaaacactctgcatgtagaatgaagcatgaagtctgagattagtgacagctgacatctattaagcacttacccatctcccagccactgggctacactctttacactagactatgcccattttaccctctcacatctcaagttctattttatccccttttacacacagcaacgctgaacacagagaggtgagttaactttcccagagacacgcagttaattagtgatgggaccaagcttgatgacagaatctgtgattttaagcaccacaccaaattgtctctgatcaaagaactggaaatggagatgagaaatgtggatgtgctcagtcttttataacggcgaaggcagagttcggcatgagcaaatttgcagtcaaaggaggaacacgtacgtcctgaaaaggcccactctgagcatggccacaccagatttaatgcaaggtctgtccttgtttgaaggagggaggctgagcatgaggactgggtggtgatagcaaggttgtctctttaaggcagggatatgttctacacatctgtggctacggcgctaagcagaatgcttggcattcagtagtgtttgtattagttatctattgcagcataacaaattatttcaaaacttggtggcttaaagcaacacacatttatgatttcacagcttctctgggtcaggaatctggatatggattagctgtgtgcctttggatcatggtttcccacagggctgcaatcacacagttgctggggctacagtcttctgaaggctcagctggggcaggatccactttctttttttttttttttttttttttgagacagagttttgctctgtcgcccaggctggagtgcagtggcacgatctctgcttactgcaagctccgcctgccgggttcatgccattctcctgcctcagcctcccaagtagctgggactacaggcacccactaccacgcccggttaattttttgtatttttagtagaaacggtgtttcaccatgttagccaggatggtctcatctggatctcctgaccccgtgatccgcctgcctcggcctcccaaagtgctaggattacaggtgtgagccaccgtgcccggccaagggatccactttcaaatccactcagtgtttgctggcaggatccagttccttgtgggctgttggactgaggatctcagttccttgccagttgttatctggacactgccctcagttccttgccacatgggcccctccaacatggcagctgcatcgtcagagtggtcaagagagagggccaggtagagagaatacaaaaaagatggaagtcacggtcttttattacctaatctcagaagtgccatcccatcacttttgcaagtcacaaggtacattcagtgggagggcatttcacacaggtgttaatgttgggggagggaaccataggagccagttcagaaagtttcatcccatagtgttcaaagtccatctgtccaattgaactttttacccattaaaattcaaatatccggccaggcgccttggctctcacctgtagtcccagcacttcgggaggccaaggcgggtggatctcctgaggttgggagttcaagaccagcctgaccaacaatggagaaaccccatctctacttaaaaaaaaaaaaaaaaaaaaattagccaggcatggtggcgcatgcctataatcccacctactcaggaggctgaggaaggagaatcgcttgaacctgggaggcagaggttgcagtgagctgagattgtgccattgcactccagcctgggtgacaagagtgaaactccgtctcaaaaataaataaataaataaatccaatcaatcaatcaatcagtcaatcaaatatccctcataggaattgaaaaaaaaaaaaacaataaactttaaactttatctgcatttagccttcaggttgaaagtgattattacatcatggccatcaagatagttacctacaatcaggtatttgaattggaaaaggaagaaagggaactaacatttgtcaatgacccattttctgtggtaaatactagtagatgccccaacgaaggtattatctcctcacttttgagatgaggaaactgaggatcacagacttcaataatttgctaagtgtcacacagctaagaagagttaagattacaagccagagtttttctgaccctaaaactacattctttccatcgattttagtcattagggccatttgttgaacgtttctggttctccccactcttgagtccataggagaactgcagtttctggcccttttgtgattggacgaggccacgagactggttgtggcccatgtgttgtgagtagaattgaagtcttacttccaggatcaagtgttttaccgcaagacccttaagaggcccctggcatggcaccagcaaagtttgagtctctgagggactatgatcaacagatgctcccatcctgccttctgctaaatccacaatgaacatgttgcacgaacaagaaatcaacttttgttgtttggagtcatggggggtttggaggtgtttgttactccagcataatccaccctatcctgactgatgtatcactgaagacgaaggagaagggagtaagggagtgtagaggctgcctcaagagagccctatttatgtcttatggcagcatgagggctcacctttaccttggctgacctgggctccatggtgtctgcctaccaaccgacttctatttctggatgcacctgggcataataagaaccagaggcacctacagcattactcagaggtagggtgtgaaccccattgcctcattcattctgaatgcttcttactttggaacagcaaagaacacaaagagagcaggagaagtgttatcccttcccaagcctgttctgacacacatagcacagcacgaggcttttgaaagaggcttaacggaagcagcatcctcacatcagagcagcttgtcacggaggagcctttgtggctggaatgggcatttgctaagttagtctcccctcactgggctggggactggttgacacagggctggggtgccaaggtttgggataatctggggagggactgaagcatagattatgatgccacctggcatgagtttcccacatcttcttccgtcggaaagacgggattctcttctcatgtcccccctgagtcatcagcccagcagcttgttcttctggttgttcatgtctccccactctcctccatgccactgaggattgtacttcctcgctgctgctgactgtccagaattcctaggtggatacagtccccttggtagacagctgcaccctccacacaggaaacagcagagaggggagtgtggagcaggaagagctgccctttatggctctgtccctcttacccacacccaccaccacacaggtttgtgtggctgccttagactttgctcaaagatgaaggtataccaactgagtaaaagatgtaatattttcaactgcataccgaatctagcttttcccatggtccaaggaggaagcatccttctagaggaaatgatattgtggacactgccagctgctaattttgtttctttaatctcttaagtccaagatatttttcagatccattccttcttcaaacttccagcatgtgaattggtacccatgtttcagaaaaccccactgtagcgattgatcttgtccaagagctatccgttccctgtttctccaacagcaggtttccttaaacctaagttattcagtctacaaacacacccgggcatggggtacccttgaaaggtagacttaggtattctaagttaaaaacacaacaaaaacaaaacaaaaacaaaaacagagtagctcttccttgggctcacctgtgttttggcttccacctatgatagcacttgaagaattggttctgttgctaagaaaagttgaaacatcactggcctgtccaaccacccccacactcccattatatagatgtaacaaactgaggccaaatgccttgccattagcagagtgctcttcaggtacactagaatcctaaaagcaaatttgcttgtaagagggaacaaaaagattcaaactcaccctgaaggtttataaaaccaatattgggttcttccatgaaaatggaagttgagagatcagagaagaaaggataaaagcattgagatggtggtggaagaatggtttattgagaggaagccacaaggattaaaaataaaaatggatttctgtgacttcatgcttctgcataggatgggttctgctgttggccatgagcttttctcttgcaactctcagtagggtggactcctctgagtcagtgagaatgggacagttgaatcaacagtcaaaacgctcaattatctgtaagttctgctttgctgccatgatgtttacactcagcctacttcattgaaagtcctataaagaaagtctgaagttgaatgaggcacagggcttcgtgccacctaaaccctagggccactgcatctgaaatatatgttctatatgggcagttatagagaaaatttgatctgttacagttatttagcttcaagcaatggtaactgaccctgcctaacttaaatagagaaggaatttattgggaggacatagaataactcataaaaacaaaggggagaaaccactttatctgtgtcaatccatctactgattaatggacaaataaaatatactacattcatacaataacatatgtctacccataaaaagaatgaagtgccaacacatgctacaacagacacaaagcttgaacacattatgcaaagtgaaagaagccagtgttgtattaaaaaaaaaaacccacgtattgtatgattccattcatatgaaatatccagaataggcaaatctatagaaacagaaagtagattattggttgcctggggctggagagcaggaggaaatggagagtgactgctgatgggtacagagtttctttgtgggtgatgaaaatgttctaaatttgattgtggtaacagttgcacaactctgtgaatacacaaaaaaccattgaatcatatacttcaaatgagtgaattgtatggcatgtgaattgtatctcaatacagctattatatatatctttttagtatacttaaagttctggggtacatgcgcagaatgtgcaggtttgttacataggtatacatgtgccatggtggtttgctgcacccatcaacccgtcatctacatcaaatggttcttctaatgctatccctccccctagccccccacccaccgacaggccccggtgggtgatgttcccctccctgtgtccatgtgttctcattgttcaactcccacttatgagtgaggacatgcagtgtttggtcttttgttcctgtgttagtttgctgagaatgatggtttccagctccatccgtgtccctgcaaaggacatgaactcatccttttttatggctgcatagtattccatggtgtatttgtgccacattttctttatccaggctgtcattgatgggcatttggtttggttccaagtctttgctattgtgaacagtgccataataaacatacatgtgtgtgttcaaccattgtggaagacagcatggcgtttcctcaaggatctagaactagaaatgccatttgacccagaaatcccattactgggtatatacccagctgttatatattttttaaaaagtttacattcagaaaacctccaaaaaatgatctaaaatcctggcttagaaacattcaggaccctggatactctagagaatccacttgtaagagagacctgatggattgaatgacattcacccatccttgttccgctgtttgcttactccactcaagatgcaaagccccaggagagcatcctagggactttacctggggatctgccatccaaacaagactgcatcaaaggaaaaataggtaatttcccaagatgaaatcaggaggttgttttcaaagaaggaaaaatggttgtgagaggtcagaatcagtgcacattgcccgcagcatgcccagaaccacatgcggtatatcccaggacactccttgtttggaaacattttttcttttttctctctttttttttttttttttgagactgtgtctcggtctgtcacccaggccagagtgcagtagcacaattttggctcattgcaacctctgcctcttggattcaagtgattctcccacctcagcctcctgagtagctgggattacagatgcgtgccaccacacccagctagtttttgtatttttagtagagatgggctttcactatgttggccgagactggtcttgaactcctgatgtcatgatctgcccacctcagtctcccaaagtgctgagaatacaggcgtgagccaccacgcctggctggcaacactttttctaatcacctgggttaaatatttttcctccctaattttctcacaaatctgtgttattttcatatttggagtggtgtctaataccagtgcacgctgtccttggcatgatctccccagccatttgacggcccctaaaatcaattacttttacagatttataaagatagcattcccatgtttctgagcataaaacaagaggtgcaactaagtttagacaaattcttttttagttttttcaggtgtcccttgtgtcacatttagagtttttctctaggtacaagagagacttacataagacatataagttttatgtgttatttaactggtacctattaccattttcttttatgttttaagatgtttctgtccaacacactgttctagtctctatcatctagtgtatttaaatggtctttgaatctgaaatgcaaagaaatatccaaagcggaggacagggaagggagaatgtatgaccacatttctaaatcttcctaccttagcctatttcacgggttttagagattggcaaacagttaaaagttgttggaagaagcactggtatggactaaatgtatcccctcaaaattcatatgttgaagtcctaaccccaaaagtgatagtattaagagatgagacctttgggagataattagggttagatgaggtcacaagcgtggggccctaataatgggattagtgtcttaaaaaaagaggcttgagagcttatgagtgtggtctctgtctttctctctctctctgtttccctctctctctctctcttttttaaccataagaatttgttagaagttaaaagggaaaaacattctttttgctgaataatatcacattatatttaacttaaagattattaactttttgaatatcaaaaattgaagctgctaggaatcacatttacttgtaggtccctaagtagccctgaggtctgaacaggaaaatatcttttataaactataacaaaagtctcacctcaaaataaaatactatgaaatttacacaattatatctgtcctcagtatctgtacagtacccagaagcctactagatttttagaaatgacaatgcaaataggtttagattcagaaaacagagcttatactaagaggacataacttgaaacctggcaccctgtgcaggaatctgttcaatccttagaacagtcataaagtcatctttgttaaaaaacacagatccttggacacccccaaatgccagacagaacaaagagaattccagtaccttggtttttactgttcatctgaagggggtatcattttcaaattccttcggatgccccaaaggctcatggggttgctggtcatatttctgggcctgtcatagccttttgcagttttcatcaagtgtatccatagctgtgcagttctaaaccagcttctagaaattttgctcaaaaactggtgttaaggtgcctccatgcttacctcccaaaacttcataaagcatcaggccaacatgcaccatcgctttacctgatggatggctttctttttgtttttcctttttatttaaaaacaacagaaggatgtagtattatgacaaaactatttccctcaaaaaccaaactgtgttagcattgattggagtatctaatacataggcagacttggggaaacaccagagcttctcaggatagatgttgattctgagggtaacctgcaaccgaatgtcaagggccataggctgaatgcctggggagctcttccagggggaaagaatcctcttgggtctgggccctctctttctttctctgtctctccctctccccttgcactttcaaagagaaggtcatgtgggcacgcagcaagatggcagtctatacaggccaagagaagatgcctcagaatgaaacctgtctttgctggtatcttgatcttggacttccaggcttccagaactaggagaaaataaattccttttgtttcagctacccagtctggtacttcattatgactgcccaagcaaactaatacagacactggcttgtacctttctgtttatgtatccctgtggttttctatcagctgtacagttatattattctcttggaaatattaattcacaactacttatggatttctgactccaccacatccctattctttatcagatctctattattcactttaacagcatccctttatttcttcttgattgtactcatactaatcgatttaactacttgtttaatgtgctttttctgctcgactttaaacaccatgaggggaggcactctcatgaacttcactatatcttcagggctgatcacagtagacactgagaaatagttgttgaatgtataaacacatggatgaatcccaatgctagtgaatattacttatccataacttactttacttcgttgttttagtaaagcattctattttagacttttgaagagcctaatagagtggtaaaattctatctttaactcagtgatacccttattggaaatgtggctttttcaaccaaaaggcaaaactcatcaatggctgtctaaattatggctaccacccaactaaagctaaaaggcctgggagaaaaatcattaggctcctgtgtatatcacgtgttgcttaatagtggctgtcttagcccattcccttgaaagcagaggatgagggagagacatgggtgcagaaagcttattccaaggaaggaatgagggacagggagatgcaagagtgagaaggaaagagacaaagataatataggattgcattgccaaggttgttgctgtagacaacagggtcttgaatgagccgtgacctctggaaagtgtgcagaatctaattgatgccctgaaggatgagaggctggtcacctccctgttgctgagaattgccccaggaccattcactttcagacttccaggctgcctttggatgaggactgagaggactcccagggatttgagagtgaggcataaacaggaaataaacacagaacattctcgaagtggatcacgggtcagcataagcctacacttgcagggaactgtcccctcataacagtgtctgaaatcagaagtgggatatcacaagtgcctgctactgtgacgaacttcagtgcagcattttttgtttttgcagtaacacattttctttgctctttatcccaggttcaagttgttgatacacttgttctctgttccatgagcatgcttggcatggagggatggaacagtaagtagggctctttagcagtcagataggaagattccccaaataagtagaaaacaatccattatttttccaagttctcaaaacagagctcctgaggcacattgcactctggtgcttacatggttctttaatgccatgtgtttctctgactcattttcttattccattgcatgtgtcccaatgcgtaaaaggttcttgtaagcagatgtagtggtggttttggtttgaagagcaaccaacacagcctaggcatccctggggagattcaccagagtctcttcgacattggggctgcagctagggccactgctgatgaaggtggggctggtgatgatgatgttggagatagcgatcagatgactccaaccataatgtcactgcttatggtgatgttttgagcctcggcaggttgagtcagggtggataaggatttatgccagacttattgtccactccttctccaagattgtctcatactaccctgccaactgagggccagcactttgcattgcccattgctatattactcattgccttcttggtacaggacagatgcttggtacatggattttgtttaattcctaattatttcatgacttgttttgacccaagcattattttcacaaactaaactatttcgaccatgtttgcatcctcacttttatccaaacattaaacatcaaattatgtttaaaaacctagagtgcttcattagtaactgtattggtttgccagggctgccataacaaaataacacagactgggcacaaaataacacagactgggggagctaagcaacagaaacttattttctcacacttctggaggctgaaagttcaagatcactgtgccagcagtgatggtgtctgtggaggtctctcttcctgacctgcagacagccaccttcttgctatgtgctcccctggactttcctctgtttgtgctgggaggcagatagagagagagaaagagagcacaccagctctgtgtcttataaggacaccagtcctatcagactttcctacccttataacatcatttaaccttaattacctccttaaaagccctatctccaaatatagttacactgggagttagggtttcaacacgtgaattttgagggggcataattcagtccataacaataaccttatggagtgaactcactctattttaaagacattgttaattaatcctgttggaaagcaatgggctagagtatgactcacctttagggatctaagtcacagatgatgcggtaggagttatggcaagattgggttcccccaagacgaagattcatgtgcagctgatttatagcaagtctcaggggagactggtaagggaataggggaagcagagcaaggatgaagggcagggaaagagacgggaagtaaatataaagattcaagcagtggccccaaggactgatattacagggggttctggggagttaattacacctcagagttgtgctgacctgggggctgggctctcctactcctgtacctcagtcattggctaagggtatgcctgagggacatcaatttccaagcattttcagttttttacacccaagaaaatccttcaaagaagaaaggcacatttgtgcattggagaaaaaagcacatgtaacctcgaagaggaatgcatagatgcggtcaagggggtcggaggactctgggtgggtcatcagtagtgtccacttcagaatgctagaataacgtacatctacgggtggggggcagttgtcacaggggccagccttctgagtagcactcagccttcccccaagccatgctgctcagatagtaacattggaaagccttagcatgcagcagtgaagagtcacagacttcaagcgtggaaacttcaaaaactaatggcttcttagacttctgggggaaaaatgggtagcgtggagtccagcatttccaagttgaatcatgaatttacaacttactaattgtgtgaccttaagcaactgacaccgttactcaagttaagtaactaagtccaactaattctaaatgccatctacaagacggagacatcaaataaataaagcaggtaaaaaaaattaccctgcatttagtagaacttgagaaacataagtccttccttccaccctcttcttccctttcttctaagtaatcacatgcttgctcctgaaaacttctgaatgcaactctgcctcttcctgtctctcttttggtctagtgcttttagcgctttggggagagagttttacggtcttgatgacagctttcttttcgtgttttttgtccctttattaagaagagaggacattcactctctattttaatttgcaacatactatggggatggaccctaattgcactttggtggaggaaagggaaagacaacccaggtggggaatagtagggtgcaccccaaataaacaggaggcagcctgagggtcctgggtctgctaacacagttaattcaattcattcattcattcacttattccatatttatctagaacctgcttagtgctgagcactgtactaggtccccaagaaacaagaaagaccaagatgaggacgctgccctacaggtatttcctgtctgttagaggctgtgggaaatgttaaaaagtgcagacatagaagattggtaggaatcagaaggaaatgtttgctacttcataatttgcatcaaactttagccaacaatgaaagccatccagtgacttttagagtttcttggagagtagaggggatataaaggaagtatagaggaaaatccaatttgtaaccagagaacataccagtcctcaattcctgctttcacctttgaccttgctcctccatgcatttttgctgcatctggccttgccccgggagtgaatgaagaaccaggggagtatgggacagagaatggggattctctgtttggatccaaatagccttagggctaactcttagtctatcacttgcctgtcccacaggtttggacaagccctcatttctctaagcatccgtttgctcatctacattggatgatccatcatccaatgtagatgagcaaacggatgcttagagaaattaaatcggggataatctaggacaagtaatagctacataatgcatggagactcttgttagtcttactgccaaaaccaccaccacaacctctgtgaccgctgctatcactggcctgcttccaacattcaaatggagttaataataggagatgtgggtatggccccttgctactgcagacactcccagccatgctcttcttacagttccattgagagatgggagagaggaggtgggataaagatagcctgggaccaagagaaatggctgagcaagaggaaaggagggaggaaggtaaagacttggtgaagtagagaggacatccatggaaatgagaagagagaggaaggaaggaagaagaaaaagaaggtagtcactcactgccaccttctcacagagcatcagcctctcctgaggaacaacaacaaaaaaaaccttcttccctccatgacttcaactccaggcccatctcaagcccttctcagttcttctgctgtcaggaagccaggctaaaggcgtagactggggcagtccaaaggctgatttctctgaaacagccaacacatggtaaacaaaatcaggagagcaaacagaacagatttcaaaccacctgcaatgggaaggtttgaaaatataaggctttggggatagaagtgtgaatctgcttcatttttaaggtgagactggacattctagaaccatcaggaacatgaatctacttggatgacttagcataaggaaggtgtgaaaccatctaagctgtcctcagttggaatgagccatctccatcaggaatgaaatgctcatcagtagacacactagaacatatgcttcgtgagaacccagtgagagatggcattaaacattttaagagtcacttttagtttaaacatctgtaatcaggaaaagaaagactaaaattactctccattttgcagttctactgagaactacaagatgttgttagtagtgagtggggaggaaaagatagttctagatttgagattgaagcccaaaatgtatttatacccactatgaggctcatagtgttagacctttttgcctgcattaagttgaggaatatccagcatcctgccactttttcccactaacttcattcagatggaccttgagttgtgtctggtgccatgacgaagggcactgacccagcgctgcgaactacttatttgaaacttccaagggggccttctgtgagcagtgagcagctctgcagacacttcacctttgcaaaatgagagagtgctggaggccctttgttcctaacaagcacagtgtcctgagcaactcctcagaggtagccatgggcaaagccaggaagcaggaaaactgcagcattgcccctctccttttagtggagcccttctgtcttccattatcctttttctgggtgtatagagccttcttcactgtcatcagcctcacagacctggtgccatgctttgaggttgctcaccaacattttggcatttgacacttgtaatactatcatgtcttagtatggttgtccctgttttgtagctaaagaagtggagtctcagacttatgggcacatgaatgtaagtgaatgctgggctgccagcaacaaatcaccctgcctggagtcagtgagcacctgatccttttgggtctacccgccaatcgagacccttaggtttctggcctttccctctccctcacatccctcacttcctccaaaacacctatctatccttcctgtcactccatcagagccctgcttctgagagaccggcagagaaagcactgtgctatgaaaagcaggtctcaggttccagtcccagctcagccttcacaagcttagacaaagtacttaacccctctaagcctcagtttcctgaacagaaaatgggactaataatggtacctcccttagaaggctgttgtggggattaaacaaaatagcatgtgaaatgtttagctcagtgcctggctcacagtaaagactcagcactgtttgctagtagaatctatgctaatagattccagtgatctaagtttgcctttggacaggatgctcctatagataaagctctcactacctgtgggagtgggggaggaaggctgtggaccataaggctgcagggccctgggcatgtagatggacagtataggcagtgcagtgatgtgggactgggctggccttgggcgtccagtttaatgatgtctcacctgacttctgcagccttccttttagccaagccactgctcattagcacttcctccagagctcaggcaaggagggaaatgaaatagggctaaatcctgtccatcctggtagttcttagcagaaaaaggaagccaagaactagattaaagttgagttgaaggtgaagggccaacgattacgctgtctgctgctctctctccccctggcagtcttaggtatttgagtggaggttgcatttgacagttgtgacacacgtacttgacccggcctgagaagccttgtcttcaggagtctcgaaggacacccctgggatttgaagactttctttttttctcgcagctgcctgagctttcagtcaaaggctgcacatctcaacataaagtgtatgagtaggaatttgcacatccatccctctgtaagagtgggcccatggaacatgaagataacgaagtgtgtctctgtcttcaagaagactgaaagccaaggcaattcttagccatctgaacacataattgcaatatattatgatttgtgctgcaaaagaaacaataataagataaaatggttccaagaacaaagagaagggagttatctattttgcccattgaagggagtggaaggaggctaagatcaggcaagattcacagggttggagacattggggctgagtagaggcatggttgtagacaagttagatacactttttgtgcgtcagtttctttatctgaaaactagacataataatagcatctactttatggtgctatcattgtgaggattgaaagagattaagtcatataaagtctggcacacagagtaaccacccaatgaatatttgcttatattacctcttagtagtagtagtaatagtagtggtattaagattattaaaaatagaagtagaagtagtgctattacttctgatattcctagtgcttagcagtgtctagtccatagtttaaggctcaataaatatctgcagaataaatactgagaaaatgaatgtgtaaaaatatgctatctgatgtctctggtcagagctggacatagagatctttttttctgtctgtaaaggatttaaggcatttcaccataagtgatatttataaaataaagtcagagaaataaaagaggaatagaaagatcaagatcaagaaaggaaggagaggccaggtgcggtggctcacacctgtaatcccaacactttgggaggccaaggcaggtggatcacttgaggtcaggagttggagaccagcctggccaacatggtgaaaccccatcgctactaaaaatacaaaaattagctaggcgtggtggcacacgcctgtagtccccactactcaggaggctgaggcacaagaataacttgagcccgggaggtagaggttgcaatgagctgagatcgtgtcactgcactctagcctaggtgacagagtgagactccataaaaaataaaagtaaaaaaaagaaagaaaggaaggagaaaattaaatttttgtctgttgtgctgttaccatattttatgaaaacacccataaggaattttcacccacattatatggcacatgtgaaattccctttgagggattatggagaaaccttcaatgagaccagggtccaccagagcagtccaaagtaagctccagtacaggtcactcaccaggggtcagagggatgggctatgtgaatccagatgctttggacaaaaacaaaatacaaaaatgaaaacaacaacaataataataatttgagccccaaatctaaaatcactaaaggagaagcttctagctggatggagctccttctcaaataggccactccctgagtcttacaccaaggaaagaaggaaccgagatttatttacttaacaatggtttataattctctcaagatatacaggtcaccaaacagttaacagaatgattgacaattggtaaacaagattcagatgggactctgaacgtcctggcaaccatctcaaaaagaaaaagatggtcagttgtatacatctggctatcagaaagagaagcttacaagttccacagaggagatcacaattttcttgatgctaaattctaaaataatgttattgtaccatgcagataagttatatagaggcactgagtgactgttttctagaaaatgcagctgtagagaggtgattttcatgtgacttttaaaagatggcctttgatgaagctggatgtgacactaaagcaaaatttagtgtaaatgtttaggaaagcatctcaagatcagggacgtttttcccggtggtagacaactgacatctccatatccttacatggcagaaaaaagcaagagagctcttttcggcttcttttatgagggccgtaattcatttatgagggatctaccctcatgacctaattaccctccaaaggtcccactgcctaataccatcaccttgaggtttagaatggtgacatctgaactgggggcaagagagcacaaacctttagtccactgcagcatatacttagtacttctgaaagaagaggtgaaattgcatgcaaaccgtcactgtacacactcacacatatatccttgcaaaataactcagattaattaaatattaatgtattttagcaatgcaactatatcagtattagtcaagtatattaaatcctaattaaacgatagcttttcttgtgtatggttttgctgtaggccatgagacaattattctctataaaatccaatcttattcagtaaacaatggttgatctcctactaagtgtcgagcactatgctaagtattggtgatgccgagatctgaaagacactgtccttgaccataagacagtcacagggtaggggaggtaataactacaaacaaacaaggaaagctctaaggaggtaatcactggaagcccgggggccgggagcaaggcctccacaagtgggcaagagatcagagcaggcttttcttttcctttctttcttttattttttgaaacagagtctccttctgtcgcccaggctggagggcagtggtgcaatcttggctcactgcaacctctgcctcctgggttcaagcgattctcctgcctcggcgtcctgagtagctgggactataggcaggtgccaccacgcccagctaatttttgtatttttagtagagatggggtttcaccatattggtcaggctggtcttgaactcctgacctcgtgatccgcccgcctcggcctcccaaagcgctgggattacaggcttgagccaccgcagcatgcttgttaaaggcaatgatgtgtgggttgagtcttgaaagaggcacaaaagttatccaaaccaaggaagatcaagtgaaggaggactctgcatgcagagggaagagcgtaggtcaaagcagtatacttggatgaaactgttgtttcttgactttggtggtagtcccatgactctacatgtgatcaaaatgcatagaacgaagcacacacacaccacacacactagaccttcatctatggtggaatcgtcctcaaagacacagactcagagccttaggaactacgaagacacagcagctctctggccctgccgcctctggctgcccctcttcaagcttgtttgtgctaattactgtggctctgacctttagaatagaacatttctaatccaatttcccaacacttctccccagaaaggcagctgtcagcaaaatactcttagacaaatattgagtgaaaagaaattgctgcagacatgaaaagatgaaatctgactttgggcagaggtgtgtgggtagacatggtctcctcctgccatgtccaacctgggaaaccattcatccttctttttctacccagatatctctgaccagccacctgatctggcttttcctggcccagcttccaaggttggagcccagaaaatttttcatcttgtgtttgcctttgtggttttgtgcacatcacttaaattctgagctgtgggttctttgtctggaaacaggagtgatatgtacctattcatctcccacagacatgggagaagccagcaagatagggcttatggaatattctatttctttcagtctaatcatcccaagaaacaagtataattttattcctcaacttttgccccactaagaaccttctctctgtggttttcctcctatctaaactctcaagagtatctcctgaacctgtcttttctcagagcaggcatcttcttgtttcttccaaagaagacagaaccattgcttttgcctcaataacaatgagctatctccaggtgtcattaaagccatgggtgtgtttaacaaatgatacacattagaacacaagaaatggtgtcaggatgactttcagaaccagagtaacctgcagtcttcacagttttccgaggagggaaggtaagaaagaaagaaataagaaggtagtctctgaattaaggatgatctcagaaattcagggctggactaattcacccaatgtgaggctattgtcgagttcccaaaatactatggggaacatggtgtaatctatgggaataatgagtggttgaacattttagcttaactgctgctgacctcagagaagaccccccacagcttcccggaactggctcaatcaaacctgggaatggagccaccttccttgagttaacacagatcttttaatgccagattcattaacagctcgccttacttcagcctccacaggtttggttttattgtgtcccaccctctaccccacacccagctaaacgttttcagagaggaggcagtcattttctatttctccacgtataatacctttgctgatttgacagattcctgctttgttcactcggatggattgacagcagagctgcctcattaaagccttctcataagctttgtcatcatctcctcaatgaagtttctgcccgtttccttccattctaaacccaactgtttggtggctggcatgttttgctatggaaggaaataccccacatgtatgggagggggcttggtacagagctcaggggcttataagccagtggaagcttgtccaacctgcagacagcagtgggcagggctggaggggcagtgggtacgggcactccgtggtggagttcctcgccgccaactgtgcattccactttgtagagacgagctggactctctgatgtgacagtcgatcgtgactcacccaggacctggcatgtcagggcacacaatgaaaatataataactgccttgttataatctccctgggagctgggagcacaagggaaaagggggaagcaaagggaagagctaacatctatggagtatctcctaagctctgggaacttcccctacatgattttatttagttctcacaagtgctctttggggcgggcttaatcttttaaaacgataaagaggctgggtgtggtggctcaagtctgtaatcccagaacttttcgaggccaaggcaggagaatctcctgtgccaggagttctagaccagcctgggcaacatagtgagaccctggctctaaaaagataaaaaattagccgggcgtggtggtggcatgcatgcctgtagtccaagctatcaggaggccgaagtgggagaatggcttgagcccaagagatcgaggctgcagtcagctgtgatcacaccactgcactctagcctgagtgacagagtaacaccctgcctctgaaaaaagaaaataggctgggcgtggtgtctcacacctataatcccagcactttgggaggctgaggcaggtggatcatgaggtcaggagttgaagaccagcctggccaacatagtgaaacctgatctctactaaaatacaaaaattagccgggcgtggtggtgagtgcctgtaatcccagccactcaggaggctgaggcaggagaatcgcttgaacccgagaggtggaggttgcagtgagttgagatcatgccacagcactccagcctgggtgacaagagcaaaactccgtcttgtctgagcaaaaaatcatcttgtctcttcagcccagctctgtttccaaacgtcccactttctaccatgggccactgtcattcttttcctctcccagatctgaaatgtttgacttctatgttctactccctaagtaaaagttttatatttatattttatgcttgtcacttccccacttttatatttgttctgcagtcttaaggtgataacaagtggggaaaggacaagatgatttttgtatgatacacattgagtctgaaaggtacatgaagcattgacatgaatgatatgtaggaagtcggggccaaagttagcaatagaaattgaggcttggggctgggcgtggtggctcatgcctgtaatcctagcactttgagaggcccaggcaggcacactgcccgagctcaggagttcgagaccagcctgggcaacacggtgaaacctcgtctctactaaaatacaaagaaattagctgggcgtggtagcatgtgcctgtagtcccagctactcaggaggctaaggcaggagaattgcttgactctgagaagcggaggttgcactgagctgagatcgtgctactgcactccagcctaggtgacagagcgagactccatctctattaaaaaaaaagaaaaagaaaaaaaagaaaaaaattgaggcttggaagacttagagagatgagcgagacactgaaggaatgaatgatgcgtctcttgaaaggatggagtgggaaaatcccaggtgaatgaagacaggacatgtgaggaagaagagaaatcaaccaaggaaggaaagaaatagtgtcttggtgtgctaagcctactgtacaaaagcaccacaaacttggtggcttaacaaaaagatacattcattttctcatggttctggaggccagaaacctccacacctggttccttctgagggctccaagggaaaatctgcctagcgtctttgtctcagcttctggtgacagctggcaaccctcgttcttccttggcgatagatgtttcacacaaggctgtgtctctgtcttcacatggtgttttctcctatgaatctcttctttttcttttctttgagacggagtctcgctctgtcgcccaggctggagtgcagtggcgcgatctcagctcactgcaagctccgcctcctgggttcacgccattctcctgcgtcagcctcccaagtagctgggactacaggcgtccgccaccacgcctggttaatttttttgtatttttagtagagacggagtttcaccatgttagccaggatggtctcgatctcctgacctcgtgatccacccgcctcggcctcccgaagtgctgggattacaggcgttgagccaccatgcccagccggatctcttcctataaggacatgaatcaaattgaatttaggggcccaccccactccactttgacctcatcttaattacatctgcaggaaccctctttccaaataagttcccattttgagttactgggggtcaggacttcaacatatcttcttggaggcagaattcaattcgtaacaaagagtaatccaaggtcgggcgcagtggctcacgcctgtaatccgggcactttgggaggccgaggtgggcggatcacctgaggtcaggagtttgagaccagcctggccaacatggtgaaaccccatcactactaaatataccaaaaaattagtcaggtgtggtggcaagcacctgtaatcctgggtactcgggagactgaggcaggagaatcacttgaacccaggagacagatgttgcagtgagccaatattgtgcccaggaggcagaggttgcagtgagccaagattgcgccattgcactccagcctgggcaacaagagcaaaactccatccaaaagaaaagaaaaaaaaatcagagtaatccaagagagaaggacaagacccaaaatataaataatccaggaaatcgcaccaaggaaggaagaattttgagaaagaagaaccaattggtcgatggttacagaagcctattgcagttcatcatgcctttcttcttgagacaccatgaaccttgcccctcaagcgctgggtccaggtttcttgtcagcctttattattttatgttgaaaacattattttttcattctctgataaggagcaaggtagaccaggacaggagggaaaatagaaaattaaaaaaaaaaaaaaaaaacagatttggccagattatccatgatgaggctcactatgtgtgacaagaggaaagaggtcagactgtggggcttcgggagaagctgggaaatgaggaagctgaccctgctggtcactgtgctaccagttccccactcccactcttccaggcatctcaaatgcgtggttttacccacagcccctgctcccatcttttccatccattctctgcccccttcaataggctctccatatttttccctacaatacacaaagtgctatcttaaaacttcaccacatccaactggccttttcaattcttattctctttgccctatggaggaggaagaggttagagataagaaatgtacattcattcattcatccgacaaaagcttttagcatctactatgtgtcagaaacgtttatatgttctgtggatactctcaagggggttacatttagttgggggcgacagaaaatagtcaagtaattaagtaactaggtaatgttaaatatgataggtggcctgagcaaatcaaacaggatagtgtgataaggaatgaccggtcaggggaaggaacacaaggactgatagagtggttggacaggacctctcctgtccacagaggcgacattggagttgccacatgaacacgaatgcacatttcccacatcccagggtgggtatgctccgtgttggctcaggagctgagccaggcccagtgtgtggaaattgcacagaggcagggtgaggcacaatataagaaagacttccagaccatcaaagctgccatctctgcagtgtgctgcctgtgctgtcatgagctgtccatctccagagatgttcaagctttaggaacgttgaccatcggtgaggaagattgcagaagaaatccttagatgtggcaggttgaactcaagattgcagaagaaatccttagatgtggcaggctgaactcaacagaaaggtcctttagctctgaaagtctgtggtttaccatcaaggtcctgctcatccactgtgcaactgcttgacaaggtcagtggggagcagcaatgcctggctctgtgtaggagacaggaccacggacatggagaataagctttatctccagcagtggtcagaggctcttcacgtagagccaggcatggtaggtggagatagggccagcttgcaagagagaaagcaattaatccaggtctcctggggatatcggtgcatagcactgttgcatgtcctctcagtatttctttgtgggatgcttatgtgttctgtatgtatccctacatgcacaatcctcatggttgtgtttctggcattttcaggaaacctttgtcccccatgtgctcacatcccatgcaaacaccatacatgtaagcccagtcctgtttcctctctttaatggcaatggtagattgtacatagagtccagcaggtgactcaaggtcagcttcctcatcagcagataaaaggaattagagtgactcagtggatcaccacctctgtgtttcatgctgcagacacaggtgggggcaaaaatcccatgagcaaatgagatctctgctccagaacctgaaaggttggcactgaatctcacagcattccttccttcttgtccacttttcatcttcctctttctcctcctcttcctctcctctctctttctcctcccctccttctcctcttcctctcctctctctttctcctcccctccttctcctcttcctctcttcccctcctcctcctctactctacctccttctcttactcttccttctcctcctctttctcttctcccttcatcctctcttttttcctcctcttattctcctcttactctcttcctctactccttgttctcctacgactacttctctgagttccctttctcctctcctcctcctctactttatcttcttctcctcccccttctccccctcctcttcctccctctccttctcatcctcttctcctcctcttcttcctccatattctccccttttccccaccctcaatccggatccaggtctttggaaacattcctcagctttcctcaggactggagaacagacaggcattggcattaatttcctttcagcctttcctcccctcttataatgactcattaatcaatgctcatgattttggaagaggcccagggatgttgaaagcagtccctaaacagggtgagacctacaaagagattatcatagatgatccattgtggatgctaaaaggtcatttttccaggctgactccaagacagtattggccacagaacagacacttggtagaagagagcctgaggtccaggcagcagcaacagcagcttcgggaaacctgagctcttctgtctcccacccctcatcctgccctattcccctcactcaaggagtttatcgtccttgcttccagagaccctcagcgggacagtgcttacttactgcctaacccaacctgcttttaagcataattcaagcctaccaaactggaataaatggaatttaaatatagcttcttcatttcccccactatttcaccaatctgtgccttctcccatcttacccatcacagaaagtagcaaaattatccactccattagttttcatctctgcctctcacttcttttctcttttctacttaaaaatatttttgaaatttatttttaaacttacatacattaaaattagcttttggtgggaacgttgctggaaaactactcgacaaaaacggaatagactatcaaagcatacaatagcatggatgaatcccaaaggcattatgcgagatgcaagaagccagtctcaaaaggttgcaaacttatgattccattaatatgacattctggaaaaggtcagactatagggacagagaacagatcagttgttgccagggattaagggttaggacgtactacactctgtttatcgatttacccactgaaggacatttagggtacaagcttttgtttggatgtaaattttcacttctcttgggtaaatatctaggagagggattgctgggtcctatggtatgtttatgtttaattttataagttaaatcagtaatccgtgttggcttatataaaccaataagctaaactgttttctggagtgcgtctcattcattcgatttttaaagtcaaaacctggcaatcattctttatcgctgtctcttcctactccccatattcaatctatttctgcacatcttcaaggttctacctccaaactatagcttccaatgctccctcctcctccatcatcactgcagcctccttgaagtgagtcaccgttatctctcgcctgggcttcttcaggagctactgttcatcctctctgcccacatccgacatcctctctgcaccctcttcctacagcctgttctccacagagcgggcaaagtgatccttttcagacattaatctgatcagataactccttacttcaagcctcccattgacatcccattgtacttggccttcagaggactctgcattctggcccatggctacactcagccaattttccactttcctcttcattgtcctgcacagtcaattagcctcctgtgagttcccagaccaagctgagccatcccagacctcaggcctgtggacaccctgcccgcactgtgaaatgcttttctctgtgctccaggcgtgtggctccttcatgccctagtctaaatgccactttctcaaaggcccttcatgtccatcatggcgcttatccaaatgggttatttttatagacatttgttcactcatttgttatctatttctttccgattcaaatgggagaaccttcagagcagagaactcatcctggttgtcactcctacttggagcagttcctgacacatagcaggtgtgctttaaaaatgttcaatgggctgggcacggtagctcatgcctataatctcagcactttgggaggccaaggtgggtggatcacgaggtcaggagatcaagaccattctggctaacagggtgaaatcctgtctctactaaaaatacaaaaaaatagctgggcgtggtggtgagcacctgtagtccaagccactccagaggctgaggcaggagaatggtgtgaacccaggaggtggagcttgcagtgagccgagatcacgccactgcactccagcctgggcgacagagcaagactctgtctcaaaaaaacaaaacaaacaaacaaacaaaaaaaacagttcaatgaatgaatgactcaatgcaatgtcatcctgtactccttatttaaaataaaataaaagagagggagtttgtggagatttcatatgggataatagcacctacttcataaggttagaattgaaatgagtcaacatatgctgaacacctacaacaatgcctggcacacagcaaacgtgatgtaaatgtgagactaaaaataataatgatggaagcaaattcatggaagaggagttccagccttcttaggagaacaaaactgtttattcctttcacaaatatttactgagtctgcacagatggaagtgtgtgtacaagcgtggaagtgtgtgtacaagcgtggaagtgtgtgtacaagcgtggagagcgtcacacccaaatggcactcttcacaagaacagaacacagacccttcacactttgctcccagaagagcccaggagtaaaggttctcaccccgctgagcatttccttttccctgacacccccaatttgcacagaaaccatgggagaggggtcacattccattttagaaggcgacatcctcacagcagggcactacgctgggtactatttgtatctgcagtgggtgcactacctactggccatcgaaaacccttctggtcatcgaaaagctcttgggagtacctttgcactcaaagcaatacacatcattttaagatattctccaaatcctgttgatactaaaatgagtgcattttcttctagggtgcgtgaaggattgaggtttgaccgtagatgttcaaatatatggaagtccatattgtcttaacagcacccagacctgtcctcccaacaatttaaaattgtcatggttagaaaggcgctttgtaaatgtaaacccatcgctttacctttccaagggcattctttatgagatgagtcatgaaagcatccttgtgcatgcaggaggcatttactaaatgcacattttcaaaaagtggtgggagacggaggaccggagggagggaggaggatacaccaacagcacatgggccctgccaaacccacctctgttacttgatatggatggtcataccggttgtgctctgcaccgaggcacctggtggagggagccattttgctcactggggctgtgacttcccaggggagttctcctcttcctaagtgccttccagaggcactcagtgtgccgacagtcacctggttccataagcagtctccttcacaaacagaaataagcagaaactggaccctgggtatgagcacagctaagttctagcctggattctgccactaacttaagactcttccctcctctagctccaggcatctacatccataagatgatgaattcagacaagatagttggttttcacacattttgttttgtagctgcagagccatgtcctccagtgaaatagttctttgaacctcctaagtgaagcaaatgaccttgaggccacgctgtcggaggtgggaggggacctgagcccttagccctcaccagggctggaccgcccccctctgcacacgaagaactgcaggacttggaggctgtctcaaatattctctttagggctatatttctgggattttataagaacctgtcaagcaagaaaaactccccagagattatagagtgttacacacagatagaaataataagacccacaattccactgtgtaccctggccattcaactgggggatgcttttcaagtctttctagcagggtcctcagctcctgtaggctgtcactcatccacttcccttcatcgaagcttctggctctttgccactacctacaatctcatccagttctctgctgtgccgtatgctcccttgatattgggagattcttaaaagaagtcagtcccccttgtcagttccagctctctcaagagcctatctgcaaatctctgcctcattgaatatgcatggtgaccaactgaatatttatgatgccccaaagtctccaaagggccccagcgtttcgaatgcatgcagccctccctggtacccattccgtagctccccagtggtgtccctgccactcatctctaccctgcactccttctcctttactgttgatcctaatccatcaatcctcagtcttcccgaggaagcttttctgaattacaccaccacccatgcagtcgacagttacaacacaggttaaaatctgtcttttggaatagaagctttccttgcacagggaaatgccagtttctcattaacttccataaaggtagatgagataggccgggcacggtggctcatgcctgtaatcccagcactttgggaggccaaggcaggcagatcacgaagtcaggagttcgagaccagcctgcccaacatagtgaaaccctgtctctactaaaaatgcaaaaaaaaaaaaaaaattagttgggtatggtggcatgtacctgtagtcgcagctacttgggaggctaaggcaggagaatcgcttgaacccgggtggtggaggttgcagtaagccgagaccacgccattgcactccagtctgggtgacagagtgagactcagtctcaaaaaaaaaaaaaaaagacagatgagatagatagatgccttccataaaaatagagaatgcctgggccgggcacggtggcttatgcctgtaatcccaacactttgggaagctgaggcaggtggatcacgaggtcaggagattgagaccatcctggctaacgtggtaaaaccccgtatctactaaaaatacaaaaaattagccgggcttagtggcgggtgcctgtagtcccagctacttaggaggctgaggcaggagaatggcgtgaacctgggaggcagaggttgcagtgagccgagatcacgccactgcactccagcctggatgacatagcgagactctgtctaaaaaaaaaaaaaaaaaaatagaatgcctgaaaaaacagggtcttacacttaccatgtgttaagaattgccttaaatacttcaccagacttatcttaagtccaaccagtgagtatcttctgggtgataatgcaacttcttcaggcttcggttttctcatctgtaggtggtgaacatgtctgcctattgtgatgttaccttaatgaaatgatgaaaagaagtcaaccttgcaaagctagttggtgggctctgatagtaatgttcctcctctctctttgttcttcactctcccctcccctgggtgtgttgtcagggaataaagaaagctcaatatcccaaggagtgagctctgagccctacagaagcagacgccgaagaaggagtgatgatttctgtcgccacgctgttgagtgtagcagaccatgtgctaatgaggatggatgaggctgtttggtagaaaggatctgctctcctggaggagaccaaactatggatgcagacaattgatggccaggatgaggggcccctctgcaaactctcaggctgagccaggcccccttattcagtgcacaaacccacttttctatcttctgggagaaccagcctccagtgcagcatcttctgacccatgctactctcctgagaagatagcataatgctcctcccagatttagacaggctccacatggatctgctgcttactccctgtgtggcctttgaaaggtcacttaacctctctgggtcccgatgtctcacttgacaaacaggcataatcccggcctgttcccatcgttgggtagttgtgagaattaaaaggagttatggtgtaaaagacattatgggccgggcatggtggctcacgcctgtaatcccagcactttgggaggccgaggcaggcggatcatgaggtcaggatcaggagatcgagaccatcctggctaacacggtgaaaccccgtctctactaaaaaaaaaaaatgcaaaaaaattagctgggcgtggtggcaggcacctgtggtcccagctactcgggagactgaggcaggagaatggcatgaacctgggaggtggagcttgcagtgagccaaaatcgcaccacttcactccagcccgggcgacagagcgagactccatctcaaaaaaaaaaaaaaaaaagacattatgaatacaagactaatttcaaatatctcatcctttcatgaagccctcccctaccctcctacactgaattaatcttgtattgctctggactgcctcctgaatactaataatatgcccctgctatagcattgctcagagtctgccctggataataaggagttattcacatgcatttgttggcctgctagaccatgagctgtatgaggcaggtgtacagggtatggctcttatgcatctctgtgtacacctctgcaggcagcacagtgccaggcacatggcacatgtacagtaagtgtttaatgaaataatcaagacctctttctgcctggatccagccttcatgttaggttttatgtgctgtttaatatctgcaggtagaggaaaggttctgtgaaggtccacactccctagcctgcgtgacagtccccagttgagcaagctggtgatataagtgggaaaaaatgggaagtttacggagtctgtatatgaaacacagaacccagttccttccctcgatcactgggttgtattcagtcacagaacacatcacgggaactagttggagtttttgaagcaattgcttcttgtctctgaaattgcttccctgacttctgggcaagtccctgcagtggttgcagagagccccagctgtttaatatccagcccactgataggagcgattgctcatcaaaccccagaaccctgatgcgttcaagagggaccgtcgacagcctcagctgcagaggtctcagacaaatggttgcagagtggattggccaacgttaagcaacaaacatgattaaaggccagaaaataggacctgtgaggaaaggatggagccatctgtttgatttattgtgaagaagaacaaataacagtgtgcaaggctgtggaaattttctacaagaagaatagcaatgtccagctcaatgaggccggaacaaggaaagaagggcatgaactgccacatgagggattttgtccagatgcaggaaggaagaactttcctactgcctggcaaccagctaggctaggcgccgggatggtctcccagaagcagctttgtaaaaatgatagacctgagtccagcagaaaaaaaacaacgatacaaatatctaggagttggaaaagaaaaagtgatgagtttgtttgtttgtttgttttttgagatgcagtttcactcttattgcccaggctggagtgcaatggcatgatctcagctcaccacaacctccacctcccgggtgcaagcgattctcctgcctcagcctcctgagtagctgggattacaggcacccaccaccatgcctggctaattttgtatttttagtagagacagggtttctccatgttggtcaggctggtctcgaactcctgcccttaggtgatctgcctgcctcagtctcccaaagtgctgggattacaggcatgagccagtgatgagtttttatgcatcacccttctgagtagatccagaactcctggatagggtaggtaaggaagtgaggccaaggcgacattggggcctgagacattgagactttgactaagcaaagcccacatccctcaacatgggtcctgccactggccccagggcctagctgagcctacagagaatggacaagtccctgaatgtgttttaatcagcaaaacactagcagaatgccataatgaatggattgcaactgggatcacaaatgtgcttacaacatagagggatttttttagcataggattttattgattaattaatgaatgattatctactagtttctgtcttcctgaggaattactagtatgtacaaagagtgtgtgttgaatctgttaaaaataaaagtatttataataaatataaatatcatcctttgatatacagttgaatagcaggctcacgcctgtaatcccagcacttcaggaggcggaggcaggcggatcacgaggtcaggagattgagatcatcctggctaacacagtgaaacgctgtctctactaaaaatgcaaaaaattagctgggcatggtggcgggcacctgtagtcccagctactcaggaggctgaggcagaagaatggtgtgaacctgggaggcgaagcttgcagtgagctgagatcgtgccactgcactccagcctgggcaacagagcaagactccatctcaaaaaaaaaaaaaaaaaaaaaaaggtacctgggatttgttttaatcaggtatggtaagacacacagacatagaaatggctgacatgaagtaggtttttactcacagatgcctataaacaaggggacacagcacatagggctacatggggaagcaccaggataggacaagaggcagagggagcagcaggaaaacatgggtaagagttttattgtggtttccacaggaaggtaaggcagagcagggtaagcaggcttaggattggctagttgggataatttcagcaggctctgggacataggggctgtctctagttgtctggttcctggccctgggattactaaggcaggtagagagtagttcagagtttgagagcccagtagaggaggtggggagctgtgggctctggattggtcagcttgcttacgaaaagcatgctctccagcaagtccttcactatctctaggaattagttaactctgggaggggtattccctcctaggtcagcaagaccccagataccagagcatgaagaatacagaaaatttaaaaatatagttaatacaatcctttccaagggcaaatatgggcacagttcattttgtgttgatattggtggacaattggatttagtaagccttagagaaatgcaagaaatttcaggcaaagccatataagaggggaaaagatcagctggatcataatgagagaaaacaagttagaaaaatagggcaaagtgacaggtagcagagattaaagctcacccctgctttccctccccctcttgcttctgtcctctctgggagagagggcaaagtcagtgtgagactgtgttctgtaaagtatgccctgaaggctgaatgttttatccagtcaggatgccatgcattctaaggctaaggactccatcagcaagcatttctccccaaggtgggcaaagatgcttgtctgtgttcaaagaccacagattctcatcttatcccagctgtctcccaagtgtatgtagccactagtcatggatccggcaacagctgacccctccctcacaccaaatacagagtgccaggctgtgttcttgctgatgagtggtgtcattagcagggtctactctctggctactactaccatcaatatggagtgttgggcaaccctcaataagagcttcctctacttcctaccttccagagataataaacacagctgacagtgtggggttttttttgtttgtttgtttttgtttttttgagacagggtctcactctgttgcccaggctggagtccagagtgcaatggcacgatctcggctcactgcaccctccacttcccaggttcaagcaattttcctgcctcagcctcctgagtagctgggattacaggcatgtgccaccatgcctggctaatttttgtatttttagtggagatgaggtttcaccattttggccaggctggtctcgaacttctgacttcaagtgatctgcccaccttggcctcccaaagtgctgggattatagcgtgttatccagtgtgttatccattgaggtaggataaaaaacgaagaagcgtacaaatgcaaattttgtctttgggaagctgatcactaccatgaagcacagcatcacatacccatgatttaaaaatctactttatgaaaaacctagatgcagagcacagtgttattcacattttcaaaggattatccaggaacagtttaccaggcaagagtaatctgtggagccaacaggctgcaaaggaaaactcgggaccctcaacaggtcatctaagctccgtaagcttgtttccttatccataaagtggagataataatggtacctacttcaaaagggtattggatcaaggagataatgtttgtagagctcttgacacagatttggcatatagccagcgctcaataaataatagctattactattcttcactttattaaatgatcaccactcctgtaaatagtaaaaaccttttatgaatcttttaaaaggtttttttaaagaaaatactgaagaacaacaagaaaataaaagttgcctcaagttctaacatttataatgattaaagaaagaagtggaaattacagcctcttctccaatcccaccctctgttagttaaatgcttttaacagaatcttttccaacattttgctgtcctttattacatatctgtaggtctgtatctatttctttttatataaaagtgagattaccctatgcatattggtctggaacttgtttatttcacttgacaatacatcatggagaatgttcctaaccagttcattcatgtctactaggttcttatttgaacagctacatcgtactttatggtacaagtacgcagtcaattatttatccattttcctgttgatggatatttaggttataatactcacggatcctaagtgtgatctgatatgaaaaatcatttgcttatacattttgtaaatacatgcaaagcacctgtaggtatttggaaaagaagtgttgaattttagattgtgcagaaggttttttttgtgtgtttgttttgagacagggtcttgttctgtcacccaggctggagtgcagtgatccaatcacaactcactgcagcctcagcctcctggactcaagtgatccactcacctcagcctcccaagtaactgggactacaggtgtgtgccactatgcctggctaatttttaaattttttttagagatggggtcttgctatgttgcccaggctggtcttgaactcctgggctcaaactgtcctcctgcctcggcctcccaaagtactgggattacagacgtgagccactgcacacagccatggaaaagattttgcctaaacttacaatacaccattagctgtatgatcaacaggttttccctcctttttggattaactataattgtttgcatcataaaattggctcaattcccaggcccacctgggtcccagtccatcacccaacagagattttcacatagattctgggggctggaggcaggaggctctactttccatcttgcctgagtgatcctccagtcttgtcaccctgtggaagaagttgcacgaagtgaaactggccacctctgcctggtgacagctttcttgtccatgcaggcccctgtctatacacacccacgtccatgaaatgaatgcattacactctgtggagaagggagccaagcaagctcagagttccacggtagaggaagaccctatcatgttctcaggcaaagaaaataatcaagccaaaagaaatccctggccgggcacggtggctcacgcctgtaatcccagcactttgggaggccaaggcaggtggatcaccggaggccaggagttcgagaccagcctggccaacatggtgaaactccgtctctactaaaatacaaaaattagccgggagtggtggcgggtgcctgtaatctcagctactcaggaggctgaggcagaagaattgcttgaacccaggaggcagaggttgcagtgagccaagatcatgccattgcactccagcctgggtgacaagagcaaaactgattaaaaaaaaaaaaaaacccttttataagcaccaggttcatgctattcaaaaagctgccacttgattatgtttctagttttttcatatattttcagttgctccacattacttaccaaaagattaaactccttgtaccagtacctctgtcttcagccacctggcctcaactgactgtcccagctttatgtcccaaaggatctggtccaacaacccacttgctgcattctcaacgtgcagtgtcctttcctgctcccctcggtgcgctttctgtcccctctgtgttctcacctccagcctactgaatcctacaaggccaccactcggggaagcatcggctatagcaattgtgtcttttaaattattttaatatgctcatgcctctcgtatgcagccttgcattgctactgtttccatatagcctatgtcctatactagattatcaaatcttggaggacatgaattaggccacatgaagcatttttgtttgaaatagtgtctggctctgctggtctggagtgcagtggtgtgaacacagctgactgtagccttgaccctctgggctcaagagatcctcctgcctcagcctcccaggtagctgggaccaggttgcttagacctggaaggctatttctgcagcttcccttgtaggatatcctagctactgcccccaggagatctgacagcttctctagaatgttggagtcatggcgcacacctccactcacatcctggccctcctctgcctgatctcactcttcccatccactccctgctttgtggtgcagcagtgggggtgatgctgcttcaaggctgagcttcatacatggtcactttgcagtgcccttgagaaggacacatggtttgcacaactgcatctgtcccgggagccgtggcgaacgcagtctccaggcctatctccccggctctggaagacacacctttttgagaatagagactcagtagagacttagtgactgtattgctctcaattcaactactagcagcaacgttccctctaccaccatcccaaagaaagttcttataaaacggagttctggggaagggactacaactgaaggaatgcagtggcaccttgttcttctagattgatgctgagagcttgctgcagcacaatctacacacacagtctacaggcctgaactaggagtggggcccagggttcaaaatgacacacacaccgtcctggaagggtgtctgcacacaatcactgctcaaagtgcctgctggacacataaacaaatcaatgcaaatatccacagaataagagaacacacctgttgtcaagtcaagaatgttgggttgaacttgaggctgcttgtgcttaggatccactgacagctgcccatccatgtggagtggtcaggaaggaatacaaggatgataaacgggtcaagcaggatgcgatagcttgaggaaggggaatagtcctgaaagaggcaagcagccccccacccaaggtcccccagtgggcccttgaaatccttaacctaatcacatctgcaaagtcccttttgccatggaaggtaacttattcacacacttcagggacatcctcagggcttactgttcagcctgccaccagtgggtgtgccccattctgttcccaagtcacactgcagtttacgtctccatgtgcctgtccataattcatctgatgtccctcatctctagacccccattccagatgccatccgtcctcaaagacccacttacataagattttgtaggcacttttttctgaactttgaggcttttattctaaaaggcagaaagcaggaaacaatttttaaattgatgtcagacatcattgatcctggaaattcattggcaattgcctcccacggggaccgttctcagcccgtgttttcttcagagaccaccccctgtaacccatcctggccctcctccattcggcctgcttaggacacttttgtgcagatcagggctgctctctactcaggcccatctctcccatctcagcctccttcatgcatgtctcaagtgtcattaagtgcctaaactgagtgctgtggctctttgtcacccctctcagtagctacaaggaaacatcagaagctgtaaaatgacaggtttttctttaacatggactatccctctcactaccatcaatgaccttatggggaacgttatcaagatgtatttattcacaagctgtccagagttagttcctgtgggttcaaggatctatttccgtcataagtattcattcatgccttcacttggcaaatatttagtaagcgtctaccatgtccacgtactgctcttggctccagggttataatgatgaacaagctcacgctggtccccatctgagagatagttcgtgtttaattcaaagataaaccaccaccaccaacaccaccctcaagttgtagatttaaagatcacctctaatttctgttaccttgatcatagaatgacaatggtccttcagtgtcagtatgacatatgatgtcatatttttctctcttctgttaattcttagatgacaaaagacatgtcaggaagattttcttccttcattaatgaagaaaagctagaggaaagtgagacaagagagggacccatctccctcattgtgatatccaaatctaatgcacttaagagcctctgagcctgcagcaggaccagccctcatcaggcactctaataggaaagcctttcacttcctcttaactggttctcacctgtttggggagtgagaatacataagggattaaagggcctcttcttgtagctcctgttgatgtaaaaggaaaacaatatccctgttctgagagtttagcacagccaaacagatccagggtaagtgcctgaaagcagggtttgctttggataagcctccattcagataatggcgaaccaagtacccacttctccctctaggccttccagtatgtgcagcaaacatccttgttcttgttaggtacagcttctaaaacccttaaagctttcataacgtccttgatattagtggttggtttattcttttccctgaaagcttacagaagcataaaaaatttcaaagctggaagggacctcagagaacagccatattatttaatttatatttttaattttcctaattcaacaacttcagggaggtgagtttatttgctctgtttccctctgttctctggcctgtttccattcattgcccaattgctgccctttcctcctggtgcccattccaccccccaggccaactttctccttgaaaaccattctttgattttccttgcttttttgcaacactgcccatatgagctttattgattctctctcccgtcctaaagttagagtatgactgtagccatgctctaagatgctttctgggtatcttagctgagatacagatggctgtacagagccaaggtccagattttgtaagcaagcagggacggaatcaaccagggacatcctctggggtgcagcctgcattctagggctcctacaaaagtgggctactgtgcctgattctgttagtacagtgagaactcaggaggactggaggctggttttcatctgaacactaatcttaggagaaggggggctctggtacctggggattattcctggagaaaacacagaacaggacctggatttgtcagcacaagggctagtccaagcccgattctcactggagagaagctcaaagcccactgtttctttcaaaacagaaaaggataacttcattcctatctggatgatcctgggtgcaacggcttctaccatttccttagaagataagtcttttgggcctggcacagtggctcacacctgtaatcccagcactttgggaggccaaggtggctggatcacttgaggtcaggagtttgaggccagcctggccaacatggtgtaaccccatttctactaaaaatacaaaaattagccagacatggtggcacgagcctgtaatcccagctactcgggaggatgaggcaggagaatgaacccaggaggtagaggttgcagtgagccgccaagatcgtgccactgcactccagcctgggcaacagaaagagactccgtctcaaaaaaaaaaaaaaaaaaaaaaaaaaaaagataagtctttgggcctccgtgactttccaaagacagaagacagcatctggcccaagcaaaatgaaccctctgtggtagcaaaataatggccccaaagatgtccacttcctaatcctcagaacctgcgaatatggtgcctcacctggcaaaagagatataatattggaagatggtcctgaattatctgggcaggctcaatgtcatcacaagggtccttacaatagggaggaagcaagatgcaagtcggagaaataaattggaagatgcctgaagatggaggaaggggccaagagccaagaaggcagggagcttctaggggcaaaggaatagtctcccctagagcctccagaaagaatgcagccccagtatcaccttgattttagccccatgagatccatgtcagacttctgacctccagaactgtcaggtaataagttcctgttgttttatgccactgagtttggggtaacttgtgaccacagcaataggaaattaatgcactctgcttaaaggaagaaagcagagcaggggttggcgggggttcctgtgggtgaggttcacgtgatctaaatgagcctcgtgggaggtgtcctgagagtctcctctgccttggatccctctgtgaagcactgggctttccccccttctccctgcctctccctgatacccaacagagctccagctccagactggagcatcatgaggaagcagttttctcttctctggcttcccagctggcctcagcaacagaccttccaaatctggattttcttactgtgatagaaatccttactttgcgtccccagaaaattcatgttgaagcccttaccttcaatgtaattgtatttggaaacagggcctttaagcaggtagtaaaggttgaatgaggtcataagaatgaggccctaatcctatagaactggtgtccatacaaagagaagaagagacaccagagggctctctctttctctgagcatgcacagaggaaaggccatgtgaggacaccgcaagaagttgccttctgcaacccaaggagagggacctcaccagaaaccaatcctggtggcacgttgatctgaaacttccagcatctagaaccgtgggggaataaatatctgttgtttaggcctccagtctgtggtagtttattagaagactgtagccgactagtcactcatcccaggtctgtcaaggttccaacttagagcaaagcctctactgccctctgttcacacagctggaccaactcagagcatttctgctgttttcccctctgagcttccccaactcaaatggccaattatgcacacagtagaaggaggtcaggagcatctctagggagaattcctaacaggtatcagtccccagagacaaatgcagaaagctgctgatgctctttagccttcccttgcttaggaagaacatcccccacaacaagaccccaaggtcaccccaaactccatcagttttgattctcgtctgcaagtatgatgacacatactccttgagaacagccaggaccaagccttccaggcaagcaggcctcccgtcctcagcctccaccaacagcaggtgaaacaagattaaaagggacaacaaggcagacatgagggagacagtaattcaattcagtaggcattgaagttataactgagcttctgaggaggggtgggggtggggacagagagtaagtagtcttctcattttgccctgacaaatgtgtgcagcatcatctcctatcactgtctcctggcaggaaatgaaggtacttgaggaaagggtgagcataggttagggggactaacaagggataatgcagtccccagggtctgacagtgatggaagagttgttgcaatccctaggtctaaagaagaaagaggccgggtgtggtggttcacatctgtaatcccagcactctgggaggctgaggcaggtggatcacctgaggttaggagttcgagaccagtctggccaacatggcaaaaccctgtctctactaaaaatacaaaattacctgggcgtggtggcgcatgcctgttatcccagctactcgggaggctgaagcaggagaatcgcttgaacccgggaggcggaggttgcagtgagccaagatcatgccactgcactccagccaggtcgacagagtgagactccatctcagaaaaaaaaaaaaaaaaaaggaaagaggaggggaaggtgctagaaccccagagaaggcagagaaaggccatgtacaggagcaactcagatgggcaggacctgcagaaatgcatagcccaactgacttccttgtcagtcttgttccagcctcctgctggtcctccctattgaccaagctcaactggaaaccagagcatcaggaaacttgggggatacagagtgaaggtgagggtggatttgcagtgctgatggaagatatcagcacgcttactctccaacatgctggtctcctttctgttctctgatatgcccagcttcctctcatctttcatgtgtcagatcaaatgtcatctgctcagaggaagcctttgctgacctctcaatttgaaggaatgcacttgactcttaggacatcttcctgtcatctactacagtcagtaatcaacttattgattgggtggtactcctttgctgtacatctttagactagggaccgtggagtctacttgaaccactggaatgaaagtgtagtgaggggagcaccatgcctggcacatattctttcttaaaagatattttttagagcagttttagtttcacagcaaaactaagagtaaggcacaaagatgttccacatatcttctacccccacacatgcatagcttcccccattaccaacatcccccactgtagtggtacattcattaaaattgatacacctacatttatagaccattatcacccagagtccataatttacatgagggttcacttttggtgttgtacattctgtgggttttgacaaaagtataatggtgtgtattcattattatagtatctgagtattcttactgccctaagaatcctctgtgccgcacctgttcatcccccgttttcccctggcaaccactgatctttttactatttacatggttttttgttttctggaatgtcatatagttggaatcatatcagtatgcagtcttttcagattgtcttcttttacttggtaatatacatttaagcttcttccatgtcttttcatagcacaatcatagcttaccacggcctcgatctccagggtccaagcagtctttccagcttagcttcctgagcagctgagactacaggctcatgccaccacacctggctaattttctttagttttttgtagagacagggtctcactatggtgtccaggtaggtctggaacccttggcctcaagtgatccttctaccttggccacccaaagtgctgggattataggcatgaaccatggtgcccaatcaggtcatttctttttagtgctaaataatattccattgtctggatgtaccacagtttatttatccattcacctactgaaggacatcttagtttcttctaagttttggtaactaagaataaggctgctgtaaacatcatgtgcagggtttctttgtgtggaaataagttttcaactcctttgaataaataacaaggagtgcaatttttggatcatatggtaagactatgtttagttctgtagaaaaccaccaaactctctcccaaagtggtcataccattttgcattcccaccagcaatgaatgagagcttctgtgctccacatcttcaccagcatttggtgctgtcactgttccagatttcagccaattttacattatcattgtcttgatttgcattttcttgatgacatatgatctagaccatctttttatgtggttatttgccagctatatatctcctttggtgatgtgtctgttaaggtctttagcccattttaaaaatcaggttgttttcttgttgttgagttttaagaggtctttgtatactttagttaatagttcttaataaaaaataaaatgtgtctttggcatatatttcctcccaggctgtactcatcttctcattgtcttgaaactgtctttgacagagcagagtttttcatttccatggagcccagcttgtcaattatttctttcatgaatatgcctttgtatataaaaagtcattgccatacccaaggtcatctaggttttctcctacattatcttccaagagttttatagtttggactttacatttaggttataaatccattttgggttttttttaattagtaaagaatagaaatttatttgttatggttctggaggctggaaagtccaaggtgccagcagatttggcaattctgactcgaagatgacactttgcatgctgcatgcttcagaggggagaaacactgttcctcacatggcagaagagtagaagggcaaagagagggtaagagagggcaagagggggccaaaatctaccaatctcatccatgagggtggagccctcatggcctagttacctctccaagatcccacctcctaatattgttacaatggcaattaattttttatatatatcatatatttatataatttagcacataggaatggaagcatttggtgttatggaaaaaacagatggacaaatggataacctctttctctctctcctctgtttttcttcccccattttctcctttttttgtattttactttaagtttcaggatacatgtgcagattgtgcaggtttgttacataggtatacaggtgccatggtggtttgctgcaactatcaacccatcatctaggttttaagccccacatacattaggtatttgtcctaatgctctccatccccttgccagtcatcccccaacaggccccagtgtgtgttgtccccctccctttgtccatatgttctcattgttcaacccccacttatgagtgagaacatgcagtgtttggttttctgttcctgtgttagtttgttgagaatgatggcttccagcttcatccatgtccctgcaaaggacattatctcattctttctttttatggctgcatagtattccatgatgtatatggccacactgtcttccacaatggttgaattaatttacactcccaccaagagtgtagaagcattcctatttctccacagccttggcagtatctgttgtttcctgacttcttaataattgccattctgactggcatgagatagtatctcattgtgatttttatttgcattactctaatgatcagtgatgatgagctttttttttcatgtttgttggccacataaatgtcttcttttgagaagtgtctgttcatatcctttgcccactttttgatggtttttttttttttttcttgtaaatttatttaagttccttgtagattctggatagtagacttttgtcagatggatagattgcagagtgtaaggtttggattgatttttgtgtgtgtggatttccagttgttccagcaccatttgttgagagaactgtctttgcttcattgtattacctttgcttctttgccaaagatcagttaactatatttacatgggtatatttctaggatctctattttgtgccactgaattatttgtctgttttttcactaataccacacaggcttaatttgtctgtcctttcattaataccacactggcttaattactgtaactttatagttaaagtcttgaagttgggtactgtcagccctccaactttgttctacttcagtactgtgttggcaattctgggtcatttgcttctccatattgactttggaaccagtttgttaatatccacaatatccacaaaataacttggtgggattttgattaggattgcattgaatctatagatcaagttgggaagaactggtattttgacattattgaatctatccatgaacatggaatattcctccatttatttatttctgtgatttttttaagcagagtttcgtatcactcagataaatcttacacacattttgttagatttatacctaagtatttcatgtttttaacttaaattttacttgttcattgacatttgtatattaacctcatatcctgcagccttgttataatcacatattagtaccagttttttgttgttgaatcttctcaattttctatgtagatgattgtgtcatctgcaaacaaagacaattttattttttccttctcaatctgtatactttgtttccttctcttgtcttattccattaattgtatttccagtctaatattaaaaaggagtgttgagagggggcatggctgccttgtgtctgatcttactgggaaattttaagtttcttatcattgaatgtgatgttagctataggttttttgaaatattatttgtcaagttaaggaagttcccttctattcctagtttagtgagaattttttatcatgaatgtgtttttgattttgtcaaatgctttttctgcatctattgatatgaccatgtgatttttcttttttagcctgttgatgtgatggattagttaattggttttttaaagttgagccagctttgcatacctggggtatatcccacttggtcatggtgtataatcctttttatacattttgggttttgatttgcttaggtttctttttttgaggatttttgcatctatcttcataagagatattggtctttaattttcttattttgtaatgtctttggtttatgtgttttagggtagtagggtaatactggcctcacagaatgagttaggaagtattctttattcatctctgagacagattgtagggaatttctataatctcttccttaaatgtttggtagagttcatgagtaaacctatttgggtctggtgacttcagttctggaaggctattaattattggttcaatttctttaatatatacaggcccatacagattgtgtatttcctcttgtgtgagttttggcagattgtatctttttaagaattggtccatttcatctaggttatataatttgtgggcatagagtttttcatagtacttctttattattctgttaacattcgtgggatctgtagtgatgtcccctctttactttctagtattagtgatttgtgctgtcccttttttttcttagttagctcagctagaggcttatcaatttcatgtatcttttcaaagaaccagttttcatcttagtttattattttctatttatttcctatttttaatttcaattatttctgctctattttttattgcttctttacttctgttcattttggagttaatttgctcttctttacatagtcccttaaggtggaaacctagattactgattttagatattttgaatatatgcattcaatgctatgcacttccctctaagtactgcttttgctgaatcccacaaattttgataagttgtgtttttattttcacatagttcaaaatatctttgatttctcttgagatttgtttgactcctgttatttagaaatgtgttgtttaatgtctatgtatttgaggaattttttgtcatctttctgttattgatttcaagtttaattccattatgttctgagaacagatgttatgttaaattcattaaggcatatttcctggcccagaatatggtctatcttggtgagtgctccatgtgaacttgagagaaatgtgtattttgctagtgttagatgaagtaatctgtagatgcaattacattcatttaattgatggtgttattgagtttaactaggtccttaataattttctgcctgttggatctgtccacttctgatacagaagtactaatgtctccaactgtaacagtggatttatctatttcttcttgtagttctgttagtttttgcctcacaaagtttggccttctcttgttaggcacataaacattaaaaactgttacgtcttctttgagaagtggtccttttatttttatgtaatacctgttctttattccagataacattccttgctctgaagtctgctctgcataaaattaatatagctactctcatgttcttttcattcgtattaacatggcttatctgtctccattcctctacttgcaatctatatgtgtctttatatttaaagtgggtttcttatagtcagcataattaggtttgtcttttgattcactctgaaaatctctgtctgttgattggtgcatttagaccattgatgtacaaagcaattactgatatagttggattagtatctaccatatttattacagttttctgtgttgttctttatgtttttgtttccattttctttctgtcttttgtggttttaattgaacattttacatgattctattttctctaatttcttaacctatcagttaaactacttttttttattatattttaagttttagggtacatgtgcacattgtgcaggttagttacatatgtatacatgtgccatgctgctgtgctgcacccactaactcgtcatctagcattaggtatacctcccgatgctatccctcccccctccccccaccccacagcagtccccagagtgtgatattccccttcctgtgtccatgtgatctcattgttcaattcccacctatgagtgagaatatgcggtgtttggttttttgttcttgcgatagtttactgagaataatgatttccagtttcatccatgtccctacaaaggacatgaactcatcattttttatggctgcatagtattccatggtgtatatgtgccacattttcttaatccagtctatcattgttggacatctgggtttgttccaagtctttgctattgtgaataatgctgcaataaacatacgtgtgcgtgtgtctttatagcagcatgattcatagtcctttgggtatatacccagtaatgggatggctgggtcaaatggtatttccagttctagatccctgaggaatcgccacactgacttccacaatggttgaactagtttacagtcccaccaacagtgtaaaagtgttcctatttctccacatcctctccagcacctgttgtttcctgactttttaatgattgccattctaactggtgtgagatggtatctcattgtggttttgatttgcatttctctgatggccagtgatgatgagcattttttcatgtgttttttggctgcataaatgtcttcttttgagaagtgtctgttcatgtccttcgcccactttttgatggggttgtttgtttttttcttgtaaatttgtttgagttcattgtagattctggatattagccctttgtcagatgagtaggttgtgaaaattttctcccattttgtaggttgcctgttcactctgatggtagtttcttttgctgtgcagaagctctttagtttaattagataccatttgtcaattttggcttttgttgccattgcttttggtgttttagacatgaagtccttgcccatgcctatgtcctgaatggtaatgcctaggttttcttctagggtttttatggttttaggtctaacgtttaagtctttaatccatcttgaattgatttttgtataaggtgtaaggaagggatccagtttcagctttctacatatggctagccagttttcccagcaccatttattaaatagggaatcctttccccattgcttgtttttctcaggtttgtcaaagatcagatagttgtagatatgcggcgttatttctgagggctctgttctgttccattgatctatatctctgttttggtaccagtaccatgctgttttggttactgtagccttgtagtatagtttgaagtcaggtagtgtgatgcctccagctttgttcttttggcttaggattgacttggcgatgcgggctcttttttggttccatatgaactttaaagtagtttttcccaattctgtgaagaaagtcattggtagcttccatgctcatgggtaggaagaatcaatatcgtgaaaatggccatactgcccaaggtaatttacagattcaatgccatccccagttaaactacttttttaaaaaccttttttttaatggttgccctagagtttgcaatatacacctacagccaatccaggtccacttttaaataatactataccacttcaaaaatagtttgatgcagtgagccgaaatagcgccattgcactccagcctgggtgacagagtgagactccttcttaaaaaaaataataatttgagtaccttataatactatgaagccataaaaaagaatgagttcatgtcctttgttaggacatggatgaagctggaagtcatcattctcagcaaactaacacaggagcagaaaaccaaacaccacatgttctcactcataagtgggagttgaacaatgagaacacatagacacagggaggggaatatcacacaccagggcctgtcaggaggtgggggccaagaggagggagagcattaggacaaatacctaatgcctgcagggcttaaaacctagatgacgggttgataggtgcagcaaaccaccatggcacatgtatacttatgtaacaaacctgcatgttctgcacatgtaccccagaacttaaagtaaaagaaaaaagaaaaaaaagaagaaaaaataataataaaataattttaattcctccctttcatcccttgtaacattggcatcattcatttcacttatggctaagcatatacaagcatatatatataatatatatacatacacatatataatttaatacattgttgctattattttaaacaaactattaccttttagctgaagtaaaaatatgagaaataagagtttttattttatcttcacttattttttcttcattattcttcctttctttatgtagatctgagtttctaacctatatcattttccttatctctaaagaatttcctttaacatttcttacaaggcaggtctactggcaacgaattccctcaatttttgtttgtccaagaaagtctttatttctccttcacttctgaaggataatttcacaggatacaggattctaggttggtggttttattcttttaataccttaggtatttcacttcacgctcttcttgcttgcatggtttctgagaagtcagatgtgattcttacctttgttcctctacaggtaagagtcccacagtcctagcttctttcaaaattttttctttatctttgacattctattgtttgataatgatgtgcctaggtgtattttttgcatttattctactttgtattatttgtgctttctggatctgtagtttgatacctgttattaatttggggaacctatcatatattcttaaatacttgttgagtgaatcaataaatactcattgagtgaatgagtgaatgaatgaataaaatggaaatctgaagaatgagtaggtattatccagttaatatgccaccacaccggacagctgccaggagaaggaaggtatggccaggctcaccccaaaatcacaggttcccccctttctggtaggttctcccctgactctatggagtactgttttcagtgatggggttttccatcactatgctccccacatgggttccaagaagagactagactcccccacattgatacctacaagacagaaaaagctaagccttgtcaggaaagaaatgacacagcaattatggtcccatgctgtgcttgtccacctgctcctgagctctgtgatgattaagctagttgtgtgtaaacttacaccaacttatgatctgaataggggacaccatccaggatagaagatagaaggtccccgaggagaacctaatggtactacttctggggctattttaaattgtgacaggtgtcttatttaaaaaatcagttgaaggcagggggaagtgagtatattaaaaaaatagagtatataaaaacatgaacatggcattcaagaactagatacaagtaatcttaaagatatttagaggccaggtgtggtggcttatgcctataatcccagcactttgggaggccaaggcaggtggatcacttgaggccaggagttcgagaccagccgggccaactcagcaaaaccctatctctactaaaaatgtgaaaatcagccaggtgtggtggcatgtgcctgtagtcccagctactcaggaaactgaggcaggagacttatttgaacccgggaggcagaggttgcagtgagccaagatcgcaccactgcaccccagcctggacgacagagcaagacaccttctcaaaatatatatatatatacacatataacagagcgagacaccctctcaaaaaatatatatgtgtgtgtgtgtgtgtgtgtgtgtgtgtgtatatatatatatatatatatttagaaacataagtaaatattagatggcatttatttgaagtagaagagactatatgcttattaaaatataatatgaaaaatgaaataataaaatgacaaactgaagtttgttttttttttttggagatggagtctcgctccgtcgcccaggctggagtgcagtggcgcgatcttggctgactacaacctgtgcttcccaggtttaagtaattcttctgccttagcctccagagtagctgggactacaggcgcacaccacaacgcctggctaatttttgtatttttagtagacacagggtttcaccatgttgatcaggctggtctcgaactcctgacctcatgatccacccacctcagcctcccaaagtgctgggattacaggtgtgagccaccacgcctggcccctgaagatatatttaagagcatggtaggttaaggaaggaatgaaaggaagcaaataacagcatgagaaatggcactgggagtggcaaagagcaaaattgatgccataaaaaaatgccataaaaaatgccataaaaaaataccaacaaggaagtgaaggacagctggagatgctctccagatgcagaagcgaaaggactaaaagatgggaatggacagagaaaagactttgaagtgtgagctcagtgagtaagaactaacatagataatgggagttcttgaataggagaccagaaaaatggaattgaatcaatataaagtataaaataggatccagtagaagaaaacttagatgaatttagagatacttgaataggtagatagaataagctccccaggcacaattaattaaaagtaaccaacacaaagaaatatattggtgatgtttgttttaatttcagaataaatcaagaatttgacaatgtcctggcaagaaatttaaaaagaaaataaagttatctacaaaggaacataagttacatttgccatgttctccgtaacataagtttatgtaaattccagaagacggcagctacacagtggaggggaaggttctgatctaagaatacaccggccaaccaaggtatcatttacttttcaaggcaatacagagactttctcagatacataaaaatctaaaaatgtatcctgcggcttttctgccaaggaaaaaaaattacactaacatgtttatctgacgaccccacgatgaatgaaaaagctcacaagactatcgcattgctagtgaacatggaaactacttaaactacgggtctaaataattattgtcaatgtagttatgaaatggaatgcaaatatcatggtccttggaagcaaaagaaagcacaatgtaaacaaagataattagaattgatcaatattggggccaaaactttgacagcaggtaaatctgggaggaagagaggagaagaagtaagatgcaataagtttttcctcctgtatgtaaataagtcattaggtactgcttcattaatgactgtcatcatcataaaaactatataggttttataatattttgaaaatcaaaagtaactacttatagagttaaatataacactatagaggaaaaaacaaaacaaaacatggtctcatacaactaatggtatgaaataaagcaaacagcaaaaaaaacataaaaagcagaaaaccggccaggcacggtggttcatgcctgtaattctagcactttgggaggccgaggcagacagatcatctgaggtcaggagttcgagaccagcctgaacaacatggagaaaccccgtctctactaataatacaaaattagctgggtgtggtggcacgtgcctgtaatcccagctactcggaaggctgaggcaggagaatcacttgaacttgggaggcggaggttgcagtaagccaagatcgtgccattgcactccagcctgggcaacaagagtgaaactccgtctaaaaaaaaaaaaaaatgcagcaaaccaaaatacgaataataataataatacagacataaggacaaacaggtcaggtaatagacaaagataagtgggtctaactcctacattaaaacacagactttcacagtggttcaagaaataaagtatagctttatgttatctacaagatatacacttacaacataattactccaaaaatgtaaaagtttagagctgagcaacaagaacaaaaaaacaccaggtgacacaaatataatataaagcagtgttgcacagaattcaagtgataaaccacttagagtacacattttttatttatgaagtttataatccatgatgaaaatctaacagtcctaactatttacacacatagtagtgttacatcagaatacttctgtaatatcagcactttgggaggccaaggtgggaggattgcttgaggccaggagttcaagaccagcctgagcaatagcgagaccctgtctctataaaaaaattaaaaatttgctaggagtggtggtgtgcgcctgtaatcccagctattcaggaggctgaggcaggaggatcgcttgagtccaagaggttgaggctgcagtgaaccgtgatcacaccacagcactccagtattggtgacagcaagataaaggggaatatttcttgaacaattcagaattgaaagactaaagaaagcggtcaatattgactattcaataattatttccatcattaacatgcagagaagtaaaaacatatttacaaaaattaaccatatattaggctgtaaagaaaacaacatgaattaacgggacaaaaatgaatgaaatccaatgaattatcccttcatctcagaatgtaaaaggatacaattaaataaattctgaaaaagtaggagagcataattgatcatcatgaaagccaaaattaattaaataaaagcagaattgattagttcattcaaaaattgtggcttaaataaatacaaataaaatatgcaaagcatgcatccacatcaatgagaacaaactagagagaaagatctgcacacacaaaataagaccaaaataaagtaagaaaccacagtggatataaaaaagggtttttgttgttgttgttttgagacagagtcttgctctgtcacccaggctggagtgcagtgacatgatcttggctcactgcaacctctgcctcctggattcaaatgattctcctgcctcaacctctcaagtagctgggattacaggcatgcactaccacgcccagctaatttttgtagttttagtaaagacgatttcaccatgttggccaggctggtcttgaactcctgacctcaagtgatccaccctccttggcctcccaaagtgctgggattacaggtgtgagccatcacacccagcctaaaatagggtcttgttaatatccacaaaagagaaaatttctaggaaactatcatcaaaattgtatattatcaaaatcaacattataaaaactttaaaagcccaaattggtgaaaaatcctggaagaaattgaaaaaattgtcagtgaattgccctctgaaaagagtctgagtagaggtaaattctcaggcagtatttggagcctcatgctacaaaacatcaccaaagtgaatccataataacgtggcttttccaattgataaaagagcgtgttattttaccctcacagtctcagcccatcaggtagcttaaaactggcatgcatttggtttcttcaagtttgctcttttcaaatatccccctaatttttaaaaaggaccaacctttttccttgatgttcttctaaaagtacaatcattggaaaacaattatctcctactctcttcatttttaaaacagatgaggtgtttttattattgggatagatgggaaagaagggaaagagactctagagaaggaggccagagaaggagttaggactgagagatgctgcggcagaggaggggaagaggccagaaccaccatagatggggcatttaatactcatttaataacactctggggaatggggggcggttctctctgccaagaagccaagagcaatttcatgagggctaacactgggcaaagctgggattgcatgctcatgtaacggggatgcctagcttccaggtgattagtgggcaatgctgtctcacattaactacctacagttgctgcctttgccatacccaaagcccagaatcccaggatatgctggacatcccaggaaacactctgcagaagttgctaaacattgccccagagctctggccaacgtagacggccacgcgcactgagtgagcctctttctctgcaaaacgagttttcacacaattgttacaatcacgacctacgagaacatgaggattggagttggccccattcctaagggaagacccagcaaacaggaagagagagaaaagggggagaaaaatggagaggagagatgctttgccagcacttttttttttttttaaatcactccttctaaatgactctggatttgtgtttttcattcaggctggatgtgctgaggcatttttattttgctccatttccctcccaccccaccttccaagcaaattccatcccagcgctgttgatttctgtcttgcgaccattatggaaatctggcttcatttctcctcctaatttatgatcttgttaacatgcccgcatgccagatggtcctgttcttcaggttgggagataatgagataaacaaaaactgctgtaagaagcaaacagggggagttttttccttgaatgggccgctcttcatttctacaaatgtgctttggaggcctctgccgcagctcactgtgattctaagcaggtgaacagccctcaattgtgctgaagtggctgccaagaggtgagtgatttcttccacgtggcgctgtgtgctctggaattctgtccctgaaagagttggggccttggggttactccccttcccagcctgccctggagcttgtcattcaaaagcaccatttgcccaccactgtcacaacacttaacacattgtactgtaatggtttgtttttctttttgcactgtgagccctccggggccagggacccgggtctctttgctctgaatgacaatgctagcacaaggcttggcacatagttggcagatagtcaacaaatagttatgaaacacagccaccgtaaatatgcaaagtactatgctaaggagaagagcaaggagttgaataagtgaaatataggccacagaatgacgcaaccagcagaattgacaaatgggcggtcagagacttcagccctgcgttgggctgtgcatgttatccttaagtgcctttcctcaccagtggagacaccacccaaggtgagaccataaatagacatgctgaggaagagttttccgtcatccttcatctttcctgcaccccagcatctgggcactaggaataatctcaaggagccatttcatccactccctttgttgtcaccagctgtcctcagactttcccaagagactagctatccaacacccactacagaaggagcgcgaaagaaataggcagactgtcactactaagtttacactggtaaaccagctcactcagcacagttggtgtctagcccgggggtctgccagcgaggcctgggggccaaatccggtgccacctgctttcataaataacattttgttagaacacaaccacgtcattcatgtatgtgttgtccatggtcactttcaagctatcatggcaaagttgaatcgttgcagcagagaacttacaatctaagatatttactccccggccctttacagaaaaacatttactagcccctgatctagaggaaacacaggcacccctgttcacacacgtgcatgggcttgcttcagcacaggagaccatcaccatgtccaccgtcgaggggcatcaagagccatggcacctgacagccccaaagagactgaataagtatcctaggtgttgcaagattctctcctcctgcatcaggcatccaggggaatgggccactgaatgcgccacctaaagcctgaaagttagggtggaaagtatatctcaattgttatttttcattacttgcaaaatagactttcacactagcttgtcataactggccataaactgttcccagagaatgttgtggggtttggttgggcggaaagtggggacaagagtcagacctgctgcagtattatcctatctagccatgtacccaggaaacatcctgaaagcatgaaaaacagccccctgcagtaatcctcccctgagattaggctcaagccggaggaatgtactgatagagttccaaataataggattagcctcagctaaagtgtactaatgcccctgactctttagaagactggaaacatttcaatttagcaatttgctactgccaggacccttttgtaaatatcctctccagtctgtcaatctcttttgagttccagcttggaatgaaattagcttgcattgccccctcccgagaacctggagtctaagtcttagggatgtgacccttcttgaaggcaagtcactggtgacaattcaccttcaggccagcttccgtgagggccgtaaagtgcctctcagtgaagattattaggagcctggccaaatgtttgcccaagttgccttgaaaggcaaaaacccatttaaatcccattcagactaaaggtcaaaagtctgatatcctgggtttttattgtgtcggatggggttcaggagcagtgggatgaagaaccaagagtgttataacacccaaggagcattacgtttccaacggagccaaacttccctgacttgatagttttgtccaaggccagccctgtgagccctcagctgtcgggacaaatagataactaaaagccacactgaatagctgaatagtgtctgcgaattggccctgagaaatctcggtgtgcactatttataggcaggaattattggtcatagagtggtcagaatcatcacactcactggtatggagggtcctttaacaccatattgttcaacatccttgtattatagatgagcaaaagctgaaacccaaagaggtgagatggctacccacagtaaagattagaattactagtttcttggccaggctttttgctgtttcactattctgcctacttatattactaaggactctttcagcttcacaagatcaactcaaactggactaagcagaaaaaacattattttttcgtggaatttatggcctcgttttactacaaatgcttggagtactgggcttcaggcatggttagatccaggtgcacagatgatgtcatcactgatctatttctgtccatctcttgttctgctttgttctctgttggtgtccttatcagacagattcctctacatccatctttccaaatcagcaaccttaacaaaaagagtgtgcatcctttccagtaattcaggcagaagccccagggctaatgctcattggttctgatggacgcacttgaattatatgctcatccctgaatctgttgctgcaacctagaggatgtgatagtcatattcacttctgaagccacatggccagagaatggcaaatggatggttcctcaaagaaaaatcagggtactatgcccaggggataaaatgggagatgctggggaaatgctggggagtccacgctgctccctgatgagtctgtttctgaagctgtcttttctcaattgggggtatgtcaactcctagtttggagcctccttgtctagattctctcttctaggctaggcaagatgtctccaaaatctttctggtcatccccttcaccgcagtctagccatccttcctctttaactctgggttacagagcccttatttgactcctcaaattattccctttgtttagggagaagaccaccccagaccaatggtcagcatcttagccacagtgcttctcggggccccaattttatgaaaatctttctcttctgctttcatgttgttctccttttgccatcctgactgctgggtcccttcttcccttttatctattttttgcaaatctcccaatctagtccactgagcatctgacatgaccttttccatcaacacttaacattaactctcccttgagtgtctagctttagtcttatttgcacccagtaattatattagagtgctgaaatatattttatgtaatattatgtggtgctttatagtttgtatctcatatgtcctttgcattaatcctgtgaagtaggcaactgccccatttgcagaatgaaaaaacccaactcagagaacataagggtaggagagctgaagggtaggcagagggaagtggcagatccaggacctgaagaccaaggccagcatgtttctgttgaaaccacacagatgctcaaatgagaagccaagcttacttaaacagcagttttcaaccgggggccagttttgcaccccagagaacctttggcaatgtatgaagatgtttttgatcatcccaacttggggatgatgtcagtttactggcaactagtgggtaaaagtcaagaatgttgctaaacatcctacaatgcacagagcaattccccccttccccaaccaccatcacacacacagcaaagaattatgcagccccaaatgtcagtactgcccaggctgagaaatcctggcttaggagcattcaaagaataggggtttccatccatagctcctaatggcctttttttctgtcctcagctacaggcaaatgaaatcagtcattaccattatttcctctttgtcagaaaggtcagaaatatacaggcctggatacaagagtcaggggagaaggacatcccttcttgccagcctctccaggtcttcccatgaccagaggatgccaaggcattggcctgcgctcatagttcctgggtagagagaccttgtagatgcatagcgtggggctgcagagtacccgagaaggtggaggcaaaagttggggagaggagcagagcagagtggtgaataatcacaacggtggaggcggtgacataaagtccaattgcagacactgagagggagtaagagaagaggaaaaatgaaggagaagcagggagcaagaagggacatggagacaaaggggacagaattctcctgccgatgaaacaggaggtgtttggaatgagaagagcattccaggtcaccgagcagggaggaatgaggcctccctgatgcctttgcaagcttcagggagtgcgattttaatgtgagtctaattaagtcagaagcagttcccattattcacactctgctccagcggtctctgagcccacatgcgctactacgttctggagaagtgcagccggtggtgacttcggatccatattcactgcaggaaggaggaagggcaggctggctcccagccgtggtggtcagacctgagccagaggccttccttggtgtttctggtcttgtttcctccagattgtgtgtaaagggaggggtgtgtgttgaaaggagtccctgtatggggctaagaggcccagggaggaatgctcatctataggagatgttgaagtttaatgaccttttgcccatctgactgatgactcaatgaagagaaagggtctttccaggggctttgtgaggaatgcagcaagccctatctgggccatgcccagggccaacagggcaagcacagatctaggaggcaaattcagggctcttgcccaatctcagcctccctgaccacagaaggaggaaatgagacccttcaatagccggagttcctttggagccccttcagcccagtgtcagtgtcgggttaggggcatctccaacgtcaagattctctagaagaagtctggactaggggccagggaagtggggtttctgtagggcaggcccagctctgtaactcactgaatgacctggaggggagtcatattgtcaacagaacggaccaggaaagcattcatggaaataatggcctcgagcagggattttgccaataagagttgggtctagagagggaaagaatttttttttaagagacaaggtttctctctgttacctaggctgtaatgcagtgggcggtgggagggacaatcacggcccactgcagccttcaactcacaggttcaagcaatcctcttgcctcagcttcccaagtagctgggactacaagcgagtgtcaccatgccagctaacttttttaatttttgtggagacgggggtctcactatgttgttacccaggctggtctcgaactcctggcctcaagccatcctcccacctcagccacccaagcatctgtggaaagaatttcaagtaaatggaactaggaggaaagcagccccagaggtatccctttaggttggactatggaggagtaatggacaaaaggcctggaagagcccattgaggccatatgcatagggacttaaataccaactcagaaattagaaaatttggtccagtgtgttgtgtactgaaagggaagctggtgaagtgtttttttttttttttttttgagacagagtctccctctgtcgcccaggctggagtgcaatggtgcgatctctgctaactacaacctccacctcccgagttcaagcaattctcctgcctcagcctcctgagtagctgggattacaggcatgcaccaccacacccagcaagttttgtatttttagtagagacagggtttctccatgttggtcaggatggtctcgatctcttgacctcatgatccaccctccttggcctcccaaagtgctgggattacaggcgtgagccaccatgcccagccgctggtgaaggtttttgaaaagtgaagtgtgatgtgagcagagtcttgggtggaatgcggtgggggaggagtctcctgttggatctttatgttcctcttgagctttccaggaacacccagtcaaagaaggatgaggaggatgaagtgctaaaaggccacagagggttgagggtacaggctccaaaatattcagcctcttagtgttcaatctaggctcaatagcatcagtagttacaacagctttaagctgaatgaaccctaaccctgactcataaagaccactattgcattgaccagcaagctacccaagccttggtgattcggtagagaatgggctggtttagaaatcatactgacttgagtttaagtctcagctctccttttaccagcagtcaatatttactatgtgtaaatcatttaatttctctaagcccccaattttatgaatgttgtcaatcataaaattaggatgatgatggattcttctcaaggttgttgtagggagtaaatgcatgaaagtgtcttacacatcatggtgcatggtgagggctcagtgaacacttatgtctcctctctaccccttcctccttgcacgcactactgtgtgcatcaagtgttggcatcctgatggtaggttaaggcaactgcaacctcctccctgaagcccagtgccctgcatgcaccactcctgaactcagaccctagcacaggctctcttcatgctcaagaagtcttagggttcccaagccccaatccccacttctcctccctctcatcatgttgcttgtttactgtcccacacagtacactttcttcacaggcttctgctcctctcttcccctcccctgtcccacagtctgtctgtcctgccagcctggatcacagaatctcagcgtcagtagcaagggaacttggagattggccatttgtcactaggtgtcttcttgcaggtggggaaccattccctgatcgcctcaacactaacatttatccaacttttccatggagataaggaatgttctggctaatgttttggctaatgattgctgtgagtccagaggacctccctcatttatatagcaggaccacctcctgacaactgtgaccacttagccaaataggactcctaaaaggaaataatgcaactcctttttttttcttttctttttttctgtttgagacagagtctcgctctgtcacccaggctggagtgcagtggtgccatctcagctcactgcagtatccaccacggagttcaagcaattctcctgcctcagtctctggagtagctgggattacaggtgcatgccaccacgctcagctaatttttgtatttttagtagagacagggtttcattatgttggtcaggctggtctcgaactcctgatgtcaagtaatccgcccacctcgacctcccaaagctctgggattacaggcatgagccactgtgccaggccaataatgcaactcctacttgttttttggtaccatgtggatacacgcgtgcgcgcgcacacacacacacacatacacacaccatctaccaaaacctttgtgagtctcctctggacccttcagcagagttgccaggcccaaggggtaccgtatacaaggcatcaaagaacgagagccatttggggattcccagcctcagcaacctcagagcccctgggcttctcttccaactctacagagctgacaagggtaggggtctccttggaaaccctggcattttgactcctgtcggatggatagaatggaaaaggaaatgttttgtgtacaatttgtacacgcacaaagtcattttaaaatgaaaactctaactaaattctgttctcccttctattttttttttgacttgttctttctttatactaatctctcatttgagtcaaaaattatttcactggagaggtggtgattaaatctgataattaggagaaataccaattaagtcaggctctgcaagcataaggcagtcctcattcacattgttatttgagactgtggcttagcagggggcttctgtgtcttcccagcaggctcccagtccatatgctcagcaggactcagggacttatctcaggcagagccaaacagggataggagcagagggttttcctccccaccccagcttccctgatagccccctcatccctgccactctcttcctatttcattagcatcccctgccttaaagactctcatctgccccagctctcctctgctgttaatgtccttggcccagacctcttcccacatgtggcttgctgcccgaacctagccctccattccctggtctctgttttctgaattgtttgttacttatcacctagggtgctcagaggtgtaatgtgctattatattagctaaaagtgaatgtcctccgcagtgcacctctgcacacccacagaacttccagtgaacagggagcctcagaaagggattgtgaaaacagttgcaccaagtctagggacctcttgcattagaactcctagggttaattccccaaaataacagggagtttatctggaatagagtgaaaacataacagaactgaggaaagatagggctttaaaattaggctggagccatcaggggaaagctcttggctgccaggctgaggagtttctgcttattttggaaggaaattgttggagggacatggacaaagctacccaggtgatgggttaacccggtgacagtgccaggctcgattcctcaggtggagcagttctcaatgttggctgtgcattagaatcgcctgggaagcttttaaaattcagttcccaggttgaatcctggaccaattacatcaaaatgtctggagtcgggagccagccattaatattgttcaaactgcccatcacagtacagccaaacaggaccacgagcctgaggatgacctacctcctgatgacaatggccgaccaggctacatccgcccagtcatgtggggtttcctgagacatgggacttccagggcaaaaaccaggaaaggcctgagcaaggtggaataagctgatcatcctgccccagtagatttctcagagctctatctgggatagacccaaacctcggggtgaaagcatcttgcccactgccaactctttggtgtctattcatcaaacagcctgagccctagagttggagagacccaggctccactacgtagctgctgtgtgactttgggcaagctgactgctccacctagcactgctctgttttttcctctctccttccttctcacctttcctggggttcatagactaagctgcatttgtgggctgtgttctctagcatgggggccagatgaaaacaagtccacagaagccaaaagaactggggacactggacaggtgaccaggggagagggagggaagaggaggccagcccatgcagaggggcatggctggcccaggtgtgctctgagcacacatgtgctccttctgtttgttgcaatgctggctggcagaattttgcaaagacaagccctgtgtccagggtttctttcaaggttcctcttagggtggctgcctaccagtccatcccctagatatgtcccagcctggcagtgacatgaaaacagtcagactgcaaggatgcaaggcatcttcctgctgttcctgaaacaggccggccaccctgccatccctctgagaactaagtgggcgtgctagctcatatattatgggctaacattctgtaggtccccttagtttcaaaccatcagggagttgatttatctatggaatgtgtaacagttgtgctgttttggctgcaggccagacttctaaatcacacagttagaagctgagggaaagaagcgtcaattatccaggctgtctgcatctggagaagtcccaaaatgacctctcccagagcagttctttcttgtctggcccatccttctatttatccattcatccatccatccatccatccatccatccatccatccatcacacaacagattaatgatggcctactctgtaccagacacaatacggtgcctgctgtcttagtacccagagtctacttgcaactacacttgagatttgccaggtgtaatctcctaggaaccagtggggcctccccattagtcaaacaagggtgtccaacctggtgagatttccaggtccacaggagagtgttcattctctcacatggttttcctccaaccaattttctgcctcccaaaacttctttaacacccttccatccaccacaggtgagacttcaaagcaaactctccaagtgctgccatcttgattaaaatttactgtaggctaaaaataacacggtgggctgaaagagatgttagaaactgtgaagcttagggtttacagtgcctacaagggctaggcatagaacgggatagaagtgggggccgggtacggtggctcacgcctgtaatcccaacactttgggaggctgaggcgggtgaatcacgaggtcaggagttcgagaccagcctggccaacatggtgaaaccccatctctactaaaaatacaaaaaattagctgggcctggtggcaggcgcctgtaatcccagctactcgggaggctgaggcaggagaatcacttgaacctgggaggcggaggttgcagtgagccaagatcgcgccactgcaatctagcccaggtgacagtgcgagactccatctcaaaaaaaaagaaaaaaaaaaaaaagaatgggatagaagtgggataggtaggaaacaatgagaagtggtgggcactgtggcaaactggaaagcacggccccagctaaaggagccaattattgagattcctgcaaacatttccatgtgggaatgcagatcctatgtgactacattttttcatttttcaagagaagataggaatccagatttcacacagattttcccaagttttaaaacaatggcagccaaagaaatccctttgcagaccagattcagtttgcatgctgcctcccataagtttggacactgagctacacactgtagtggggggacccccagaaccatgtcctgggcccctgtagattctctcctgaggaccagctctgctaggagacaccctgaagccttgacctggggaaaggagaagacaagacagtgtcatgggccaaataaatggatgaggaatgaggaacctgcaatcatgggggaccagcctggcttgtgttctgagattgcttctagaaattctggtgtctccgctatcattttcaagtgccgtgattttcatcaaacctgggggagggaagggaagtgatctgatttatgggttaaaataatcactctgactgctgtgaggagaaagaggggctgtggcaggatccagttgaaaacgggaggaccactgaatagactactacaaccatccaagcacaagacactggctgtggttaaagggcatcagtcatggggtctgagaccgtgttgagaatgagaaaggcctccctcctcgacactttagacgaatgttcttgaacacagcaatgagaaatgccacttcagggatcaatcataccctagcaaacatttgttcaaaatcttttccttgaccccaaagctggccataaattgtcaccagtcttgtttcccacaaccttgggctctccatacatgggttaagcttctcactcctcataagatctttccagcagccacctttatttccattccttctgcctctaagggcttcctcctggccttctctgtctctcgcatcctacgacatccattcctcaatactggctcagacacctcctcaccccccaggcttgcagagcactccatttgagttgttaaagcccattcctctcttgctgattgacagtacaagtcatggctatacctactcctggcttggaggtgagaccttgagagcaggtattgggttctctttctttatatattcatcccccagctcccagtaagtgcttaataaatacagtgtttttggaagaaagagaagaaaggagtgggaactgggggaatgttaattagttctagcttagaagctcattgctcttcctcttcctgttttcttcctacctcaatagaatccacaggtgggagatactggggaagcagaggctctcaggataaacagggatgttgtctccatgattaagactcagttcaagggaaagtcctttgtagagtgttcactcctgatgtatcttgcaccttccctgagctagtccttcctcctcctccatccccaaacatcttggacacatccatatcctactgatctcacactcagaatcattggtatgagtatctgtcttcctgaggacagagcttgaatctgtcttctaagatgtcctttaagagagaagggaagtaaagagttacatcgaaggaatatgaactagtgttcaataatacagtggggtgactatagttaataatttgttgtacagttcaaaataactggaggagaggaattggaatgttcccaacataaaaaggggctgaatgtttaaggggatggacatcccaattgccctggtttgatcattacacattatgtccatgtatccaaataccacatgtaaccctcaaatatgggcaactgttatatatcaataaacaataataataaaaagaagggaagtaaagagaagagaagaagggggcggataggaggagaagggaagggcttggactgtggagccagaaagacctgggctggactagcagctcaaacgtgtaataaaggctgtggacttgtaggacctactatccttctctgagcctgtatccccataacaacgaaggatttgcttgatgatttggtgaggtgatggatagaaagtgcttagcacacagtgcctggcatagagtcctcactcagtaagtgtttgtttttgctactttattgtcattattattattaaaagggaaagagcgaggcagaggtggaagctgcagtcacaccaccttgctgtgacaagggcaccttatgagccttcagagattgggctgggctgcaccctcagcacgtggactggcttctaaggatgcatgatgagcacccagcccactgaagcttagcttctgaaaagaagggcaaggatgcaagccctagaactaccctggggcaggaagttcaccagggccagaattcagtgcctcactgaattgggagaggcaagatctgacactgagatgacggggtggcagtggcattgctgtccaagaagcatcttccctcctcatgcaaggctagcattgagcagaatgacgccacttggggagtggactataaagcaccattatcccctttcaggacgttttatcctctatgaagcacctcttcatggaacctcacaaacacacacacaacctctgctttcttcccccacctgtcccacctaagtctcccatctcaagccagtgacaggctccaaatatctctcttccttagcaaaacaactcccagctagttagcactttagaataggctactttatgctaaagtgttaatggatactaagacttcatgtacactcactcattcagaactttaataggggagcaatgctttacattagtccctcttttttgttttttatttcttttaagtaatttgaaatctattctttttctttctttttttttttttttttgttgttgttgttgttgtttgagacagagtctcactctgttgcccaggctggaatgcactggtgcaatctcagctcactgcaacctccgccttccaggttcaagtgattctcctgcctcagccttctgagtggctaagattacaggtgtgtgccaccacacccagctaatttttgtattcctagtaaagatggggtttcaccttattacccaggctgatctcaaattcctggcctcaagtgatccacctgccttggcctcccaaactgctggaattacaggtatgagccatcgtgcctggccttgtccctcttaaataatggctatgagcatcagcctgtggagcctgagaccaaagcagacagttgggcagggacccaggcagaggccagagatgagaaaagacatggagtgaagagaattcagacgggcacaccctggccaagggaatctgacctcctgccatatgtatgcactccttccctgctgctctccatcctcagtctcctcacagattgcattctgatatggcctggaagccccttctcacttacgggaggtgtcagaagaggcagtttggaaaagcagcgtcgtggtgccccagaatgtttagagatggaagccagattatgaggttgcacaactccaatgatgcccttcccattgcagtctctgtaaatggtgccacctgcctgcaaaagtgctgtgcatggcctgtgtactcatataaagctgccctggatggaagaggtcttggaatactggtcaacttctcaattttgtaggtgaggaaactgaggcgcaggagtgaactgacttgctcaaggttccatggtagtgtcaagtggggacctccagtccaggccacgttttaaaccatagttttcctggtttgttcaaaaggccaagatacatccatagagaaagcaatctccgctaacaaatacggtagccactaggaacatgtggctgtttaaatttaaattaattcaaatgaaatcccattaaaaattcattttctgagttgcatcagccacattttgagtagtcagtagctacctgtggttggtggctggtgtgttgcaattcccatcatctcagaaagtgctattggacatagatggattatggattatacttgggtctacagggaaactggaaggcaaggcagaaaggttgttttttcccaaagcatagtgtgccaggtactgtggtaagcactttgcatgtaggaccccattcagtctttacaagtgctgtaagtggtgtcatgagtcccttcttacacatgaaactgcagctcagcaaaactaagcaacttgccatgaatacatagcctgtaagtggacttgaactcagatctgtttgacttcagaggccaggtgcttaattattaatctctaatgcttccaacacattttttttttttttgagatggagttttgctcttgttgccgaggctggagtgcaatggcacaatctcagctccctgcaacctccgcctcccaggttcaagcaattctcctgcctcagcctccggagtagctgggattacaggtatccgccaccacgcccagctaattttgtatttttagtagagatggggtttcaccatgttggtcaggctggtcacgaactcctgacctcaggtgatccacccgcctcagcctcccaaagtgctgggattacaggtgtccaacaaatttttaaaagtatatagaccaaagtgctgctggagagccaagcaaacagatgctattttcaagacaacaaagattatgaagtggctaaaaccaattacaggaattaaggaggtttttttagtactagaagaaaagaccaaggcatgacttaatcccatttctaggaatgggaggctgctgggcaggcagttgggcctccataggtgctagaggccagcaatgagaaaagacatggagcgatgagaattcagatggccacaaagtggtgcttcttgagcatgggcaacagagaagacagagagagagagagacagagagagaaagagagatatgagtgctgccacccagagatatttagagaaaaagagcctccggtgacacactccccagggtgccagtggtaccctgcctgcagatagacaaggacaagagagctcttgttctctctcctaatatagtggaaaaggagagaaaagggcaggagagatggacagagatggtggaggtattactgtatcctctggcaaatgctttgctaggaaggggacaattccttgataacaaattcctttgtttttccctttttcaactttgggtttatttgaggttcctctacctgggctttaggaacaaagagaaaggctgaaatgtttgaaactcatacccacagaaattcagtctaaccacactgccatataccattgcagagggttaagactaaaaacaggccgggcgcggtggctcacgcctgtaatcccagcactttgggaggccgaggcgggcggatcacgaggtcaggagatcgagaccatcctggctaacacggtgaaaccccgtctctactaaaaatacaaaaaattagccgggcgtggtagcgggcgcctgtagtcccagctactcgggaggctgaggcaggagaatggcgtgaacccgggaggcggagcttgcagtgagctgagatcgcgccactggactccagcctgggcgacagagcgagactccgtctcaaaaaaaaaaaaaaaaaaaaaaaagactaaaaacatcggccaggtgcagtggctcacagccgtaatcccagcactttgggaggccgagacaggtggatcacttagatcaggagtttgagaccagcctgaccaacaaggtgaaaccccttctctactaaaagtaaaaaaattagccacgcatggtggtgtgtgcctgtaatcccagctactcgggaggctggggcaggagaatcgcttgaacccaggaggcagaggttgcagtgagctgagatcgtgccatcgcactccagcctggatgacagagcgagactccgtctcaaaaaaataaataaataataaaaaatatcctgtttggcaggcactgggtggggttccggggttggcaaagcaaatgcaatgtcatgctcacctttgtatgcagtagtttactcttgattctcagaagtctgccatgaacagaacagtaggcagcctttttggatgggtttgggcacagagctgggtctcaagctgtctaattccttgattaatttcagggtcgggtctttggagattactgtggggtaggggtagaaggatggttggaaaactggattacctttgatcaaccatgtactttttcttttatttctccttcagaaaaagatgctagtaaaactcacctgaatttccctctgtaagagctgcaagggttctagaggtcatctagaggtcatctagtcctcatataacagatgaagaaactgaggcccagagaggttaagtgacttgactgagatcgctgagctagctgattgcagagccaggaatagaacccatggctgacagcacagaggctttgaaggcagttcttaccatgcagaggtgacgtcctttgcctattatctgcctgcgaaaacttagccaccaaatataacttaaacgaagcaaaaacaggctccccttcggtcatttgcaatctctggatatttccagcaaggctggagagtggaggtgggggtggggctgagggtctggacagagccccgcccagccacagagaagcacttttgattgtcttgatgtcactaagattcttgaaaaatgctgtcccattgtccatactgactcctgctggttgttcccacttctcagcctgacagtcggtttcctcccctctttatctttgtggtcattgctggcttcttcctgccctcagagaccagcctcagagaccgttctgaaaagctcttggaggttccctagaccttttgccccttggagatgtaataaggctttgtatattgttgtcgtcaaatgtaacacaaatggctggattttcatggatgatgtttatcaattgacatctgctgtctgtatcctatgctgtttcatataggaatgtataccagatgtagccggcgctactgtggctgttgtctgtattgtatgtgtatttgtatgctctgtcagtctctctgtactccttctctatgtacaagtgtgttaatgtgtatgctctctgcagccttctgctgtctgtctctgtgtgtatttaaccttgtaccaatgttcacaatgtaataaaagcagaactaaaataacacaatgccttctggcgatttttaaacctaggggagatgctcacttatctgggatggatgcatgagttattaccaaaaagcagtgggttgtatataaaatgacttcttgatgaccttggaagggtccatgagtcctttggccctctgctgagggtaggcaggtaagaaagtgcttgtatatgaggaggaagagggaaggctggcttcatgggctttgcaggtgaatcactgcaatccagagtgtcctgtgtgaaatctcaaagtgcagagcagaaatcaaacagctcttagtggactgtttgttagtatccgtgaaagctccatggccccaatctttgctaaacttttaaagcactctgcaaaatttcaccttgagaaatgctctttcatcatgaggaggaggtgaagcatccctcccatgctgccctctctgtcctgatcgtaggagcccagggaactgaactcatttagaagagacttgtctcaaggttttgacatgatcctattgttaagaagtgaaaccagcattcctagccttggccagagaatagaaggcatagagtaggaaagtatctatcaaatcacatgcatcggcccaggcagaaaagaagtggggggtattgcaagaaaaaggaatggaaagtttatttacaacttaatccaaggaccttgtagcttacagtgagctggaacatcagggtcaactcagcagggatgccacgaataacacactgatgggagaaggggaaggacacacactccctcagattcctcatgggaaggggacttattctaaggagctggagatgttaggactgaaaaggagcttcaggtctcaggtatgtaataccattagcccttaccatgggccagaaaaccctgataaaagaggtaagcacagcacctgtgtcccaagaggcaactggggtttcatgaagatgttcagtcactatgtgtctgacactgctgtggagctgttcttgtcctcactggccagttcccatctggaattcctgagactgaacttccacatctcttctttaactgggacttgaatgttttagcaaagcctcattattcagaggctggaactacctggccaggaccagatattgtccagatactgtctttttattttgttgggagaaaagttccagtacttttagaaagtccagcgatcgctgtctctctcctttcttttccaaaaaggagtttataattattacctctcctctaagtaggaggtggaagtatggcttatctcccaggattctgggttcacacactatagtcatttggataagttcttcccagcagcatccttcttggactttcttgggttcatggatgggttccagaaatgggaattttcctgtctgttaaccttgtagggatagacatggagtgggatgtagctgtgtggactgcagaatcatgctttagtgcaggaaaatcccacagtgcctctctgttctttcttaagagcctacctactcttaagtctggctactgtaaacatagtctagaatacactgaaaacactgttctgggaacccgtcctttccttcatgaagaccctgatcagtgacttccaggctcaaggggcttcccagagctttggcatggattgcagagcagtggaatgaacaaagactgaaccaggagtcagataaggtaactgggttcattcatggctatctcacttttataaaattaagtcccagatgcatcctaaaaatattttcaactagaaacggttattcatttaaacaaaactgagtaccttctttgtgaacctatgtgctttgtgctatgggaagccagagaatcaacaacaataggataaaaccctgccattcaaaggtaatgcaagaggaaatggagaagaaaggcatatactgtataccacaaggcagtccacgatgcgtattggaatagcagtagaatgaggaaagaagagggtgggggagtattcatggaccttgagggatgatggaattaggaagagagtttggttcttaatttgtagttaagatacagcaactgaccactcctaatgcagatttccactgaaataggagatagggaacaatgcatatccacgggattatgttctcaagtgaaacgttgatattcatgaagctgatgaaaattcattctctgagtgacagacacttgaggagatggtcagagcattctcttccctcaccccaacatatctgcacctttcttccttttattttctggcctccctgcatctcttcttcttttgcctctttctgtctctctttacttcctctttttctctctcccttcctctttccttaattactgtctgcaattactttggggagatgacatagaagagcaaaagagttttcaatccaggttgaatgaccctgggtatcacacacaagtaatttaacatcagacaaatcctttgtcatggtcttttttctccactggaaaatagaaatattttccttgtttgccctaaccccacaaaacccatcagttataatcaatcatatgagaactgacagaggattgagctccaggaagttaaactgtgtgttgacccacgctattatgatgaggtctagcagttgcactcaactagtcccctgggaccatttttagcccagaggagtacaaagttggggtggaacatttatctgggagcttctggactggttactacctgaaaaagcagtgattccatgccacataaagcatgtaactgctgtgagctttttataaatgagcttaaaacgtgactcagacccttccttttatgcccactcacacttcaagttttacaaaacaaagttcaggacctaggacagcaccgtcgccccaactgactcccaggctattatgtagggagattgacaggaaggaacaccagtgtgaatcaggctgggcatgagtagagaggagaaacagtgtaatagtcaaggctgtctgctagtgaagagatgatcttagagtctaggcacgttgaggccatgtagttcaacagtccagtgtggaggtttaagtcttcaccctgccacccactaactgcatcttcagaaagttactcggcctgtcctaccctcagtttcctaatctacaaaatgaggaagacaatgacatccaccacattagtatctcataaagagccaataaactaatgtgtataaaatgccttgtagtataaattgctcaattaatattggtttttaaattttcagtattattgaaggaaggtgaattggacaggcaggctggggaacagaatgtctatcttttccttacaaggagcacataagacctgccacctacgtcaagcacaggctttcttggccccgatgatgtatggagcagagcacctccccaccctccgccctacctgccttctgctcagagctttcctctccacccagcctctgagcatcccttctcatccttcatgaaccacccaggcagatctcagtctgcattgccttgggcaataagagatgtcttatgtttcccacccgctgaggaaagtaacccattctcttactttgccaccctgcattaaacagatgtattcccccctttcctctttccctggatctctgagaaatgatgctttcctacagtccagaagaggtcttcccacctctccaacattattacttgagaagagcatttggaggaagtgagtgtagtgcaaatctgcctgctgttcactgacaccctgacttcaacatcattgttttaatgtgtctcttgccactaacttgaaagtatctctctcctttaaaacaataagattatttcatttctaatctttagcactccctccgattgcataacatcctcatcctttgtgtatttctcattgaaacatctgttcaaattccatttagtgtgagactggcgagcttaagacatatgtcccctcccacacacaggagacatgaggtcaaagggagtgagctagcccaaggactccagtgctaaccactagccagttgcctacatttccacgatgaggaaactactttcagacacaccaaggaccatctctaagccttctgctaaagcagctttattcttctctactccaaggttttggaggcagcaagcttgatgcagtgagaaaaccctggactggaagtcaaggtctgattcaaactcttgctttgaaatctactagctgtgtgactgtcttagtcattcgtgctgctgtaacaaaataccacagtctgggtaactgacacagaacacagatttatttctcactgttctggagtttggaagtccaagatcaaagcaccagcatctggtgtctggtgagggctacacctcacatggcagaagacagaagggtaaaaagggacaactccaatgtcaagcccctttataaaggcacctagccccattcaccaaagaggagccctcatagcctaatcacctcttaaaggacctaccacttcataccatcatatcctgaggacctctaaagctcaggaaccagtggccaaatcctcaaattcactcatggttgaatcagcccctcccctcctctcccctcccctcccctccccttcctttcccacctctcccctgccagtgctcccaggtcatttctccttgggggtgcccacaggtgggtgcttcatgcaatatggcagacagaggtgagaaggctttctccttctctgccttcttccttggctatacaattttgtggcttccttttattcatctagcaaatatttatgaagttagtgactctgtaccatgcactcctttaggtattagggctataatcagtgaacaagacaagtatggtccctctgtccaagaagatatctaccagtggcaaccaatgagcaaacacacaaataagacagatgcaagttgtgatgggggccacaaagcaataggatacaaaagaggaacatggcacacacttgagacagggggtcagagaaaccctcctgaggaagaaaaacctgtgacaagagcttgtatctgagtgacataatagcaccagctgattataaaatcctccctggaaggtttcactgcataaagcatggatgggctctcagaatcatcagggagaaggaattcagacttcatgcctgcacagccttagtctcttggatagtccaggtgaaagaagtgtcggaaggcccaactctccagctcatggtttaggccaaccctgggcatgggcagaagttgcttcttagctaccattggagccccctccttagattgtattcgcaagtccatgaacaatcttggggaacacagtctgaggagatccactcaaaaagtacctatgcatagtcaacgacagcatcacacatggtcctctatgcacgcagggctttaccatttatgaagcactttcaacatctattatttcatttgaggctcagcacaactgtatgatgcaggaaggaaactgagcttcagagagctggaggaaatgcctgaggtcacctccctccttggtggtgtaaccagcacgaacactttccatgaactgtggagagctgtttactggatactcacagatatactttggcagctgcagccttgacctccgaaccaccttggcctcccagtctctccaaaactcctgccctaactgaaggtcttttgagttgcctataagacagactagagcaaatgaattaacctctgcaacagcaagaaacacaaggctagactttcctcggaggaaatggagtgagttgggcggcagtgtcccactctgggatagaagagagaaagcaagctaaggtggcagagggcaggatgaaaagagatgctcatcctcttaatactctattgtctagtgtgctttgtgcaccctgccctgcaaggaggaacatctatggtcttattgaccacttgcatcttgggaaagagaggctttggaaacacaggtccataaagaaagaagcagactcaaggtctgagatgggagaggtaagaaggcaaacctgcaaggagctaaaggcacctaagggaaaaccgaggaagaagaaagcacacactttcctgcctgcagctttgcacagagctggcttcttgagagacaataccagtaacttggtattgtcccttcctcttggtggtcccaggctggagagtcctttccctcagctatattactcactgaccccttcccgaagctcactcctctcattttcatgatgtcacagattatatgtcactttcttcagggagcctcctctgatgcctaaccactcgaaaaggtctgtgttcccacagtgctccactgcagagccaccatgtccttacctgtctgccaagtaaactgagtgcctgagtggtcctgggtcctgggtagggggagaagaacattagcctgtatcgttgcttcagttaaagcctttccaagttggacaaggatttccacagttgcaaaatgcaggaacagccacccaatggaccttgccaagtgatggggttgtcccacattaaagaaaatatccacaccccaggactgtctaggtagtgcttaagccacaaaccctgggatctgtttgaaaggtgagtaaaatccttgttctagctggttcctatgcaaaggttcacaatatgccctaatgtggcagtcttttttcctgtctgtggcatggtagaaacagcacagacatttgagagaatgaatttcaagccaagtttcaccacttaccagctgtcttggatttgggtaaataacatcagtctctaaatcaaatgcaagcagtactatgtaatgagcagtatgttacaattaacagagctcagtgcctggtccataaaaatgtctcactaaatggtaggcattagtgttcttgttagtgcagaagagtcagcatcgtttgtagctaaggatccagactctaaaaccctgaggtcagcctgggttcagaccccagttctgccatcttctattagatgaagttattttcctgcactgtggctcagtgttctcttctgttaaatggagctaggaagagcacccacctcataaatttgtgactatgaaatgagatgacatatgaacagggcttagaaacatgcctggttcgcatggaatgctatgcagccataaaaaagaatgaattcatgtcctttacagggacatggatgaagctggaagccatcattctcagcaaactaacacaggaacagaaaaccaaacaccccatgttctcactcataagtgggagttgaacgatgagaacacatggacacagggagggcagcatcacacactggggcctgtcaaggggtgagggggcaaggggagggagagcattaggacaaatacctaacgcatgagggacttaaaacctagatgatgggttaaaggtgcagcaaaccaccatggcacatgtatacctgtgtaacaagcctgcacattctccacatgtatcccagaacttaaagtaaatttttaaaaaataaataaactgaatgaataaataactttaagcttccccccacaaaaaaacagtagaaaaaaatcaaaatgttcatcaattgatgaatagagaaaatgtggtatagcccccaccccccaaaaaaatgcctggttcagttagtactatcatgcttgttattatcaatctttaatgttatctacattttcaaagctatagaaaatgaagttgtaaaaaagcaaaattatcatagcactttcatcttctgcatcactcccttattgattgcaaatcagtaaacccactccaccacgttccttctgtgtgcaaagcactatgcagctggtgaaggagataaacaaggttcctgcattagagaagacagtaatctggagtctgggtcagacacatctgacacatggctgctaacagccagcccagccctggatgtgtacacaagccagaagcatgcaggacggagaccttgggcgtgtggtacaaagggccttgggccaggattcaagagactcggattctagtgccactttttcagcacactgagcaaactacctcaccactgtgacccttagtttctcctttggtaaatgaattggattcccaaggttcctgtcttccaatttgaacattcaagagatttcttaagtacaatttcatgtcggcaccctttgattttgaagaaagttccattcaaaaatcacctccttgaatgaggttttgatgacctatgtaattttttaaacagcattatctacacataaagcatctttatatctggaggaatgtgcctgggcaggtgaatctgtttgcctttcctttcaggaaaatgaaaacagtctcacctcctgtggttcctttttgccttagctccccgtacaggacacttatagacaagtacaccacctagttactgttaattaatctgttcaactcacacacccagaaacagctcattcttccactctctgtggtgaatcctgttctttgttaacttgcatatatcactttgtaactgtatgtttacacctcttgagtcaaaacaagtcaacttcttttttttgaaattgtatttcaaattgaattttttttaaactgaaaaaagttgtcactttaattttttaattataagtaactttatattattgcaacaaaacaagtaggttgtagacaaattagaaaatgtaaattagccaaaaaagcaagtaaaaatgtcaataatcctatcactcaaaaataaccatttattatatatccttctagattatgtacatccaaacaattaatataattaagagagtgttatagtataatatactgtttccagcttccttttttcacttaacttgcataaatttgttaatgatctacattatgagttgtaaaggctgagggatcgtctattgcttggcattctatattttattcaactcatctactattgttgaacacagattattttcaattttttggtattatccacaattttgcagtgaattttctcaattatttccttaggatctattgccttttaatgaaacggctgggtgaaatggtctatgtatttttaagattttgaatacatattacttaatttattttcagaaattttatagtgattgtatgagtacctatttttctttccgtttcccaagaagcatgtgctattttctttatttatgatatctacatatataaagtagcacatgtaagtttatatatgtttattacacacatatatatgtgtgtatatatgtatgtgttatatatatatatagtatatatacatacgtatatatgcacataagatacatacatatatatatacacatacttttccagtctgagaggggtgaagtggtatctcattgttttaacaggcatttctttgatcactgaggctggattattttcatatgttcattggccaagtatatttcattcattcaataaatatttatcacctaagtgtcaactcttcgaatatttcttctatgaatttctgtggagaaagatgtaacttttaaatgagcagttgctttttaagtctcttcattttcaacctatgtcacatctctgggtaacagattctggaagctgacttgcataaatcctttcccatcttccacggaatgatatgcttgagaacttgttattgactcttcctagcctgtttttctcctgccttttcactaaataagtatagaaacttgcagacaagatcccagctaggatgccagctagctgtgcaatctatctgaactcattcccttcacaagtcgagcattggtcttccatgtccagaaactcaatcttttagtgccctggagctgatcctgagtggctaactcaccgtgaacaaactcacaggagaccgagtatataaaccagagagccaacttatttatttgagatgagaattataactgtcaggcagaccagacaattgcgggactctccagtacaatttatctcaggcaagctacagaagcagcccaacatctcaaaagggtgcttcatgagtgggagatgcaggatgaggggagtaggtgataggtttgaaactttgctagcagcatgctctgacagtctggtgctccatttcccatgctcttccctagacagtgcctagggagaggcagttctgactctgctttgtggccgactggcaccctctcctcttcgtggacggccctattgtaccttagctgtgatcacagttccaggcagaacaccatctagcttgactgtcctgccagtcctgtcttttaatggtgatttgactcttgcctaacatgctgacttaatgtttaaatttttgttttgttttgtcttcccatgttcaatgcatgtatgctgaggacttcctatgtttcaagtattgtgctggtattgggcataaggcttgggcttctgttggtgcccgagatagcatgtttgtaaggcatgatggtattggtcatcaagttttttcaggggaagcaattctaagtcaatccttcttcatagaattgccattttagccgctctgaaatgatggggaaggtaactgcagcagacctctctgtggcctgcattgcatccatctctgctttcagcctcatctgcagtggatggttccatatgacctcagccttcctcacatgggcagcatccccctgtgaagcacatctttgtgctttgtgctcaagggcaatgtcttatgtggctgaagcccagaaaggcgagagagttaatgcacccagaggaactcttggcccttgtgggatgggagccaacacagaggtgctctaggctcccttccttcgggtgaccaatgccaggaggcacctgttcatttctcaggaggttcttgcacagggcacatgtcctattgtatagcagcagcctcaactaaaaatccttgtagtggcttcttttcctctcttatctccattccaggggtcatgccccaaataaataatacacacccatatccttgtctctaactgtgcctttgagggggtggcatggaggccaggaacagtggtcttcccaggggtacaaggggctgcaaaggcagctcatgaagccctgtggacttcctttagagaccacagtgggtgatgatgccactgtcagggagcatgtggtctcttcaggaggacccaggattcccctaaatccttctatcagtgtgtcattgggaaggagggtgacaataccagaagaacccttagaaaatgctccatatagctgggattgcacaactgcactacagtctgggtgacagggcaagactctttctcaaaaaaaaaaaaaaaagaaaaaagaaaatagagaaagaaaagaaaagaagaaagaggaaggaagaaagaaaaaggaaggaaggaaggaaggaaggaaggaaggaaggaaggaaggaaggaagggagagaaaatgctccaaataaccactaagactttacttattggatcccctgaatagaggaatttcctgtctcgggtcgggtttcttagaagttgagcctgagacaagattcttgggcaactgtgttattgagggagttttctcaggagatggggagaaaagaaagaagggtggggcagggtagaaagctaagcaaggtgtggtctcagctggtgactggctcctgcgtgatcctacgaagagctctggggcacagagtgtgtagcaatgttgatcagactttgaggcagaatgtaccctttgtgcctccatgtgggtcagacgctgaccaaagcctgcctccctcctcacaacactgtcctagcaaggtggctcagattctgagcagggaactcttcccaggagcgcaagggtagatgcatcaactcaaccaaggagacctgggcagggcacaagcacctatgtttccctgtgtgaggagctcctaaggagcaaaagagaccacttttccttcaagttgtcacaatgcagacttctgctctggctgtgagctttgaagcttccctcgcccacagttctctgcttaatctttacaagcatctctctctccatccaaaacaaaattccaactgagagctcaggggagtgccagggattctctccacataaagatatgtggcagattttttaatgttgtgacatcatcctagtcattagcatgaaaattctcataaatctccatcattccctccagggttgcaagctgataattaggaatcttttttataagctgaacaccagagcatttcctcaagcattccattgcctcagaagagaaacatctagtgctacataaggattggtgacaggaagctcaggaggtatccaccctgcctaaccgttgggggcagatgccaaggcaactccttgcagcaatacctcagagtctaattccacagtcatcagatcttccattgaaaacactaggtccaattctagtcctgctgctcaccagagtaggggcccttgacaacacacctaacttccttcaaccttggtgagctcattcacaggggcagaataaagattagattccaaatgaacataacagcaccttatgaaaagacactaaatcactgatgtgctggtagacaagctgaaggagggggatctcagggaggaggaccccaatatatagcatgttccaatccccatggtgtaaatattcccactgtggcagacttcaaactacctatggtttaacaccagctcaagaaatccctgaatgtttgaaactctgctcaatggagccagtagaaggcagctacagcacactaccagtaaatccatcaaagtggtagtcactggtaccttctcagatagataaatggttagaaaaggggacaactaggactgttcctggccatggatagtctctgcagtgacttctgaaagagtcttggtataatactcattccaaatcttcacacacatggattaaaaaatccccaaagctacaccacttgctgcagccaagcccaacccaaattcagcaccttctggtacaagtattgtgcgcagacatcatgctgagaattcaagtctttgagactgagggacctggtacccctggtagaagtctagaaatcagaaagtggattagggagataattctgggtttaatgagcatatagatcataatggtgtaagtatccaggagactgtcaaaactttaaacttctaaactgacaggtctcagtcaatttagaagtttcgttttccaaggttaaggatgcacaccagggagacaggtctatgcttttctctaaagatgatttgagggtttcattctttaaaggaggaaagcaggctggaggggaaagaggtggggtatattcacattactgaatccacttgttgcaagagaaaaggagcaggtaggggaatagtgaattatgtattcatcttgcactcagtaaattggcactttacataagataaggtgaacatagagtagctacctgtggagatatttaacctcttatctgtagctatctgcttaggaacaaaaacaaaggcagcttcttgtatgagtcaaattcagattaatttttttcttttagcataatgaaattagggcccaagtctttgttatggaatcgggttcttgctctgtcacccaggctggagtgcagtggtacagtcacagctcagtgcagcctcaacctctcaggctcaagctatcctcctgcctcagcctccttagtagctggaccacaggcatgtgccaccatgcccagctagtttctttttttattggtagagacgggggtcttgctgtgttgcccaggctggtcttgaactcctgggctcaagcagtcctcccacctcagcctcccaaagtactgggatttacaggcttgagccaccacacttggccccaagtttttattttcctgtcacacctgcacagcttactgctcaccaccccaccctcagcattaattgggcccaacctccatcaatggccactcatttgtagggtagagctgtcctcctgagatgctgtgccctcttggtttctatgaacctctgtagggttttctgcttgccagagggtttatcaaagtatttcttccaaccccatcaaatatcctccaccaccaatagaactatggttctttgtgtcttaggaagggcagggctggacacacacattttaggccacacatgcagaggtggcgtggtgccgtggtcgagagcacaggtctagatttcctggtctcaggtcccactgccattttgcattaactgtaagtgttggcagctgcctggttttatttttgtgccttattttcttctttgtaaaattaacatgttgactatggttcagactgaaggaatcgataagtaagatgcttagaactatgctgggcacatagtgacattagcttttactataattgatagaggtcagtgataagaaacagatgggctctcaaatgatagtttttttgctttgttttgtttaaaaggctggggacagagatttgctgaactttaacatgttgggccaggaaacacacacacacacacaaacacatacacacatacacacatacacacacaaatgtccacaccctgtgatctgtactggcttatttcacttgaaatttatgattccaaatctcagattggggtttgacactcccaggtatcttattgtttttctctaacatgtttgtttttctgtggtaagacagtcatcctcaacccatgtggccagtagaatcacctagagagtttttaaaactacagatgcccagaccccatccaagaccaattgaatcactataggaatgctggggaaaggaggcacccattggaatattttgaaagttctgcattcaggtgattctgacgtgcagccaagacagagaaacattcctttaagaggattattttgtaccttctgtttcctctaatcctcctactctcccttctcctttcaactcccagctgatgaacttgtctcatgcttcactgaggaaattgaagctgtctgaaggaaacttccctacccacccatggtcaaaaccattgaagtatctctgtctggagccatagcctctcccttctcctctacagaggaagtgtgtttccccaactcccacttcctcacgtgttattggaaagcttgtcctcttcccctctccctccttcaccagtccctctttctgctcagactttgcctcttctcctccgctgccaaaggtgctctagtttctcttagcttggagaacagtaacaaaagcaaaccctttcccttgactacacaaacactattcacaatagccaggaggtagaagcggccccagcatccgtcagcagacaaatggacaaataaagtgtgtccatctctacaatgggatatcattcagcctgaaaaaggaaggacactgacccatgatccaacatggacaggccctgaggacattatgctgaatgaaataagccagtcacaaaagaacaaaaattcaacagtttcacttatgtgatgtatctagagtaagcaacttcgtggagagagaaaataaaacagaggttaccaagtgctgcagtgaggagggaggaatgaagagttgttgtttattggggacagagtttcagctagggaaggtgaaaaagttctggagacggagggtggtaatagtaggacaactacgaacgtacttaacgccactgacctgtacataaaaaatggttaatgtggtaaattttatgttatatatattttttcacgattaaaaacaataataacagctgtaaatacctgccccccaccaaactcccatatgtttctcagcccataaccagtctggtttccacctcccccacgccaacaagcctgctccagctgaggtcaccttgacacacatgtatgcaaatccagtaaataccttctttctttccttcatttaacctagctgaagcattcagctgtcctcctgagatgctgtgccctcttggtttccatgacatcgtgctttctcatttttaactcctaactgctctcctctgtcattggccccaagctttaggttttaggttgaagggcttcctctgttctctcctagaccttttctctctcctctctgtgtacacactgttcttttatctagggtaattcatctagtctcagttttaaatacagtctccatgtggatgattctcaaaattacatctcgagcctcgactttttctctgaactccagaatcataaattctactgcctacttgacatcaacacttagatgttccacaagcatctcacacttaatgtgttcaaaatggaacttctgactttacattccccacctgtctcaccaccaccaactgtgcgcccaacaaatttttccccatctcagcaaaggatgaattgtttgaatctcagtagcatccctaatttccttacaccccatatataatgcattagtaaatcctgacagtcctaccttgaaaatatgtcttagatccatccacttttctgcacatccactctgtatttagtctaagtcaccaactttccttagactgttagagaagcctccttactggcccggggtcttgaatgattcttcttcttcaatggtatctcaagcctctctccttcttgctctaagctgtgatcatccagctacactgatcatttcagtgttgcaactatgcttatgctcagcttagctcatctctttcctacgtcaggggcctttgcacatacagtatgcacacgtgcacacacacatcccatgcacacatttccctctctcgctcctctaacccaatgtccatttgcatggctggccccttctcatccatgagacctctgcataaatatcacttcctcagagaaaactacctcgatcaccctaatagacaccacctcctgtttttatctgttccttatgtctaattgtcatcttttcagccttatcactatgagcaattctttctgtgtatttaacttattattgcctatctcttccaatacattcttaacaccatgagtacaagaactctgtctgtttggttcaccactgtatttgtagaaacccctgagagagttttcacctgggacaatggacgcgcaataaatacttgcttgacagaatggggaacattgtcatcatggaacatggtgctttggatttaaagcttgggttcaaattaagatagacttttctggtcatgttctagaaatttataactctgaatgttccctcatttttatttgctaacaaaaatttctttattaagataactgatcttaaacactattaaccagtggattatattgttctttaaagcaaggttttgaagacaataattaaatatatattttgcaattaaagcaagattttagtaaaatgtagtatgtatttggtatctttttcataaattcccaatatcaattcatccttattctaagtttggtcaaaatcctcttaggacttgaggcttcaggtcaatctgacttcaaaaatacttgcagctcatcttagggttgctggctataaagttttagaaactcttcattgtgatggccacctatcaaatactagtgatgaagaaactgaaggcaggcgcagtggttcacgcctgtaatctcagcactttgggaagccaagttgggaggactgcttgagatcaggagttcgagaccagcctggacaacatagtgagaccccagggcaacatagtgagaccccatctctacaaaaaacaaaaattagccaggcagaatggcacgcacctgtagtcccagctatccaggaggctgagatgagaggatttcttgaacccaggagttcaaaagtgcagtgagctaggatcacgcctctgcattccagcttgggtgacagagcaagaccctgtctcttaaaaacaagataaactagctagactatatctcttatctctcagcttatcttttctctctttgaagaaacaggagtagtgaatagggaaaattctacttagagatatatacagtttttacattgagtgtttttctatttttaaaattattatttttatttatttattattattattttttgagacagagtctcgctctgtcacccaggctggagtgcagtggcacgatcttggctcactgcaacctccgcctcccaggttcatgccatcctcctgcctcagcctcccgagtagctgggactacaggcacccaccaccacgcccggctaattttttgtatttttagtagagacggggtttcaccgtgttagccacgatggtctcaatctcctgacctagtgatccacccgcctcagcctcccaaagtgctgggattacaggcgtgagtcaccatgcctggccctattattattattatttagttacagggtcgctttgtcgcccagactggagtgcagttgcatgatcttggctcactacagcctcaacctcctgggcttcagtgatcgttcagcctcagcctcctgagtagctgggactacagacacgcaacagcacgcctgggtatttggttttttaattttgtatagagaagttgtagtttgggatatcagggggatttggacaccaaagagtcaggctgtttctgactaattaggatagtctaagggtgtgtgttggggatgcctgctatgaaaatggtgtgctttgatatttatttaaaatgtgcctatgttcatctcctttattctccatgtagctatttactggaaagtaaagtaaatatcagttaaaggttctctatgttgcccaggctggccttgaagtcctggcctcaagcgatcctcccgccttggtgtgagccactgtgtttgtccaacattgttttaagaaacccaaacccatgaccaggatctatctcagtagacagtgtatttcatattatttgttccttatcacactgaagcattttcaacaagaaatattttatactgacttgcatgcaataatactttacacgtaggcttccagaagtttctttgccttcccaagtttccagacatgccttgaggcttcctctagagtcactatctccagagctgcttttccaaaacaacttgtaccattgcttaagcagacgtttttgaagatttttcttcttttgccaacgtttatgcccggtttcttagcagatgtttagtcttgtttcatccaggatacggatgctgagctctctctgagcctctaaaaaaatcccatggtaagtttttaggaaccaccaactaagcctcttggttaacaagcaaggactatgtaaaggcacgttctagggctgagcagagaagttggagagatctcctgctcaaaagaaataaaaggcagaaaaccccccgttggctccgatcggatttgctgctgtagtttcactgtagtcatttctagcaatttattcctctccttgtctgtgggaggattagagtctgcaaaaggaatctgacaaaacaccaaaaagtgtagctgaatgaaaatgctgaaatatcactgcagaggcaggcagatgtctctctgtgagccagggagatagatatgcctgagagaggagaaaagagcatttgtacaaagctggagccagaagtcaaagtgggagcttgagatgtgagggggatttggccactgaagagttgggctgattctgactaacaaggatagtctagggctctgcctgtgtgggcgcctggctgtgaaaatggcatgctttgatatttatttaaaatgtatccatgtttatctccctgatacttcatacagctatttactggggagtaaagagctataatcttgaactctttaaaaataatacggctgggcgcagtgactcatgcctgtaatcccagcactttgggaggccgaggtgggcagatcacctgaggtcaggagttcgagaccagcctgaccgacatggagaaactctgtctctactaaaaatacaaaaattagccgggcatggtggcgcgtgcctgtaatcccagttactcaggaggctgaggcaggagaatcgcttgaacccaggaggcagaggttgcagtgagccgagaaacacgccattgcactccagcctaggcaacaagagtgaaactcggtctcaaagaaaaaagaaaaaagaaagaaaagaaaagaaagaaagaaaaagaagaaagaaagaaagatgaaagaaagaaaaagaaagaaagaaagaaagagaaagaaagaaaataatacacatacttttcagcttgaattagaggacaaggtcacacttctgccatctggtaatagggccccgaaactactgagaaagggactgcaccccacttcttcagttatgaaaagataacaccaaaaatcataagagagcaacttgtttcaaagggagacagaaaacaggtattctagaaagacaagttgcttttatttttcttctataggttaatatggtccataattatgaaagaaagtgtcccagaagaggtagattgaactcatagataaaaaattagcagcatgtttttaaaaaccaaggtatttatctaggtagtgggcttatagataattttatttatttttccataatttcttttctttttttcttttttcttttttctttttttttttgagatggagttttgctcttttgcccaggctagagtgaaatggtgtgatctcagctcaccacaacctctgcctcccgggttcaagcgattttcctgcctcagcctcccgaggagctgggattacaggtgcctgccatcatgctcagctaatttttttgtatttttagtcaagacggggtttcgccatgttggccaggctggtctcaaactcctgacctcaggtgatccacccgccttggcctcccaaagtgctaggattacaggcgtgagccactgcgcccggtctatttctctataatttctgaatgttttgcagcatcagtcacttctataatctgacacttgaaaataaataaaactgtcctattttaaacatcaagcagttagagattatctcgctgtattttttagaaaagtaattcctacacagttgaaaccctgagatgacgggggggtagatgatcctttcatgtctaacaaatgaaaggccagcagggttttgtggttacaagtttgatttttgtttttgtttgtatatcttttatcttgtttcagaaaggaattcaaagagcctttcaaaggcaaaagaggatttaaaaggtggagtaagtgaaacacgtggaggggatagaattaagctgaattatgtggcccaggcatctactcacctgcatatttgatctggccattccaacagccagccagagaaatggaatcttctcagttatacgattcatcatgcccacaagaagaacacaaccagtcgtaggggagatgtacacttattggtacaaagatgaggcattctcccagtagtcctcttaaagaggatattgtgaggccaggcttggtggctcacgcctgtaatcccagcactttgggaggccaaggtgggcagacgacaaggtcaagagattgagaccatcctggcaaacacggtgaaaccccatctctactaaaaatacaaaaattagctgggcgtggtggcacatgcctgtagtcccagctactccagaggcggaggcaggagaatcgcttgaacccgggaggtggaagttgcagggagccgagatcgcgccactgcactccagcctggcaacagagcaagactccgtctcaaaaaaaaaaaaaaaaaaaacaaaaaaaaaaaaacgtgttataataaacaagattatcacaaatgataaattttaagggttgttttatataacagtctttatggctgggtctggtggctcgcacctgtaatcccagcactttgggaggttgaggagggctcaagggtttgagactagcctgggcaacatggcaaaaacccatctctacaaaaagttaattaaaaaatattggctgggcatggtggtgcacacctgtagtcccagttacttgggaggccaaggtgagaggatggcttgaggccaggaggttgaggcttcagtaagctgagatcatgtcactgcactccagtctgggcaacaagcgagaccctatcttaaaaagaaaaaaaaaaaacctgtcttcaataaactaagggtatcactccgaagtgaaggtcagtaaaagcacacatgatggtggcatgaccctaccaaggggacccccccccgctctctgctgatttggtgtggcccaaatatggtttcaattatcaggatgagtaaatggcctatattccttttctaaagttctctctggatatcatttctttcagctaaactgttggtaaatactgcatgggagggagctggagattgcattcctgggcagtgcaaatcctctgttttgtaataaacaatgaatctgaaagaaggtctcatctgcttatgaaaactaagaagcctggcaagagtccttgcctagtttgacagcagacctgagtcaaagttgtgcctgcagactgtccccacagacacactactattttctacctgctccacacgtgtacaggtggtccccagagcatcgcacttgtactctatgtagcagagacaaaatcattttaccctgcacagctttgtagagcacatgcagccacatgcccacactctgaatgataccaggaggtatgacttgtctctctaactcctgttaacttccccgatggttcatctgggggtcttttctacttagaacccaatgatagttccacgttatacagctgagttttaaaaacaaaccagaatggagcatttaagcattttgctgaagcattttgcttcttgggttgcttaagaaccattctgcatggtggctctgatccttactagctttttgtttttataattattttgtattcatacatatacaatatttgtatatatttctggggtacatgtgatatcttgatgcctcaagctatctatcatcatatatatatatatatatatatatatatatatatatatatatatatatatatatattataatgatcaaatcagggtatttaggctatccatcgccttgatagcttcttgactttaataagcactccagatgagatcctgcctacctggaccaagtggaaagtgaatcccatcttccaaaagggaaaccctttaccacccaagaatacagacctatttctttcctggacatttttcccaaagaataggccagcttctggcttgattaaccatgggtttgggttccccaggtgaacattcctcaccattcatatgaagaatgatggatgagtcttggctattccataaagagctctgtaatatgtactcctgccccgtgaggagaaccattaaataatatagtagatcacacataaatatgatgggagtttccttgaactttggttcatggacaggagtcaaaggttaagctataatcattccacatagattctttgtttggattgaaatatagaaattggagtctagtattactataagagttggtaaaaatgttgctttcttactgagtctactgctggatgatgtgtatgcctttccagccatataaggatgagaaggataatcattctttttatattcagttagtattatttattagataattaaattagaaataacctcatgaaaaaactggtttgtctgggtaattactgccacaaaaaatgacatagtttaagggttggcactatgagagtgggtcaaatctggcctgctatctgtttttgtaaataaagttttattggaatacagtttcacttcactcgtatatgtatcatctacgattctagaatggtagaattaagtagttacaagagagaccgtacagcctacaaatcctaaaatatttactcactgcctctttacacacaaaaaaaattgtcaactcttgatacagaacacctaaaaatctgaagttattgtttttggtaggtagtccctagtttttattcacttacacaaaatctccctaatatccctgaatcagaccaccttgtatgatccaattgccatatctatcaaccagtctgttctctcaaggtttactggtaattatgtactcattggtatattaattgtgtttttaaggcaaagaactttacaataaactttaaatgttataaaatcctagagagttccttccaaatttggggggttgggggtactttataactgccttcatttgtttttggctactcaatagtatttaccaaactaagcagttgtatccattgtaaaagaaaaaatatgaactaattacaaataaattttattattaaaaatgtgcaggatcaatataaagaagacagctaatattttctaaggtgcataataaaagattaaattaaatgagggatatatactgtgtgtccctgaaatgggaaaattttaattatccccaaattcatcagcaaatgtaattccaaacagaaattctaatttgcttttggacaaaataatagtaaaaaacatgtagaggaataaatgcatgaggctaaaacgtatatacacgcatgtataaaaatacagatggacagttgcactgctagatagttagatattgaaaggtaatatacaattgtaatgattaaaacagtggtgccaaacagatagaataggcagcatggaattgtatgtgtaatgaattatggtccacagagaaagcactgagacacagacactgggtggaaatattcacttaataacaaagaactggctgatatttatgtgcacattttggcaacccaggagacagcagcacaggcattcagaagcaccccagatggtgtccaagacccaaggagatgcttttgggcaacagactcccataacagaagcctgcatgacacagacatcaccagatccagctcgattctccttttatagtcaactgctgcttattttgagatgcttttccagtcaaaatcttgattcccatagctgctactctactatgaaaatagtcttaaatggccgggcgtggtgattcatgcctgtaatcccagcactttgggaagccgaggcaggcagatcacgaggtcgggagttcgagaccagtctggccaacatagtgaaaccccatctctactaaaaatacaaaaaaattagccggacatggtggtgggcgcctgtagtcccagctactcaggaggctgaggcaggagaatcgcgtgaacccaggaggcagagtttgcagtgagccaagattgcgccattgcactccagcctgggtgacagtgtgagactccatctcaaaaaaaaaaattaaaaaaaattaaaaaaagaaaatagccttaaaactatggaatagtttctggatataagttcgtagttaactctataggcctatctttgggcaaccctgtcttaccagctataatctaagcagcctagatgctcagccaacaaactatgctgtcttcctcaatggctcaatatttggtataggattaagataaattgacataaaactgaggaaaggctgcattagaaccaatatgtattattttataataaattcttatctcatgatgtaaaacaaaacaaattccacatatactaagatgccaaaagcgaaaccatacaagaataagaaaaacaatatgtgtcccaattggggatgggaataatctctttgagcatatccctacactaggcccaaagtccctgctcaaaaattgctttgtgaattataaattaataaattaccaaaggacaaaccatagaggaaaatactgataaagttgactatatttgaaagtaagagatttgtgagtcaaaaaattaaatgataagacaaatgattttgggggaaaatgttatgatgtgtgacagatgggaaatcaatatcctttatatataggagtctctaagaaaaattaattaccctaataggggaaaaatgggcaaaagaaatgatcaaacatattcaacaaatattcaaacgtatatcaaacttagttcccctatcaaacatagaggaaatgaaaaaatgattaatttcactagttactgatgaaacacaaagtatacttgtgtatacgtttctagttggcagtgacctcccccaaaacaaacaaaaaaaaacacctagtgctgctcagggtgaggggaaatgggcacagtactgtcaatcggaatcagaattctaattcagcacatttctgacaccttgaaattagaacccctctacattctgattctagtaatcttccttagggaaaacaattaaggacatacactaagttctgcctgttacgagccttattgataacaccattgaaatggaaacaacctagttatctaacaataaggataggttaaaaaaccacacacacacacacaagttacaatgtattgatgtagctgaatgctaagctaccattgacagtcatcatggaagtgtgcattattgacttagaaaaacagtgacagtattttgtcactgaaaaagcacatctcagtttgttcggcattgttgcttttttgtgtggaaaaaaatacacacacacttcttttttgttcaattttactttctggtttttcaacaattatacatgttaactatagagtttttagacattaaaaccagcaacagccagagttgtttttagcgaggacacagagatactcagctgctcccagaagcccagcacatgagcagagaaatggcatgcttccttcagacatcccccgcttgatcacagttgaaggaatgtctcagaacaccatgttataaagttctagcagcatccctgacatgtctgttgtcaaggttagtcgtttatttaagatgttcttctttgtggaaggttttccatactcatgaggaaaagaaggcacagtgtgtaaatttttcacaaacaaagctagcatatgtttcagagcgaggcagctgacctctgtaatgatggccgacgtttctcacgctaacaagctaactttcttcaccatggatggaactgcacggcaaatggtgaacttcttaattgttctttcttccccataggcagtatcagctgatgtttggtaggttactgcagtattcgtagggataggattcccagtggaccaataaagttttttcagttgtctttgaaactgatttgagtagaatgccaccaagacaaggtcaactgtgcagtattgataaacaaagaaacagctcagataccgttagtgagggttaatatggtggctctgtggccagtcggtctgggtcatcagctggtgccattacccatagctgtgtgagctggacaggttactactctgtgtgtgtgtgtgtgtgtgtgtgtgtgtgtgtgtgtgtgtgtgtgtgtgtgtgtaagtgtgtaaatgtctttcccccaaattacttttttgggacatttttctatgatgccattgtcctccccctgatgagcatttcagtttaaacacacgattctcagagcaggttagctacagatgggggttttccacagtcttggaattagtactgataaacaaagaaacagctcagatacggttagtgagggttaggatggcagctcttctgttggtctgtctggttcatcattacgcacagccagtacccacagctgtgtgacctggacaggccactgcaccatgccttagttttctcacctataaaatggggctactactagtttctacctcttagagttgctataaagattaaatacagcaatatatgtaaagaacctagttggcccctaaagtttatcgagtccttcacatttataacattgacagtaatcagtggctccatgcatggattcagaagcaatgccttagacgggaggaataagctttagtgatccactgcacagaatcgtgactataattaacagccatgcattgtatatttcaaaattgcttaaagattagattttaaatgttctcaacacacagtattgatgcatatatgaggtgatggataggttaattagcttgatttaatcattccacaatgtacacatgtatcaaaacactttgtgccaaataaatatatccagtttattatttgtcaaatacaaataaaatttgtaaaataaaatgcctcatgaaatccacgcagaggaaatatgaaaaactaggagatgtgagaagaaattcagtcagaagtcagatgacagaagataatgatgtagaacagaaaatttcatagggtggagagaaaattgaagcaggagaagtttggagtgacacatgttgtcacttgaccagcgccagccgatggctctgaactgcggtgtaagtggtgcaagaattagggaagaaataggcaccgggatcttccctaggggacagcaggcagatcaagccacgtataccatattccactcccagccaagacatggagaaggagtgtctgatgaggcagcaaagtgttaacagtgggtatcagaaagagcatgtgtgagctctgagacgttggtgcctggtgcccagggagcatagatccttgtttctttcccttccttatctctctcagagtgtccaaccaaaaggggagaaagcaaaataggctgtgcgcgcgcgtgtgtgtgtgtgcgcgcacgcgcgtatgtgtgtaaatgcctttcccccagattccttttttggaacattttcctatgatcccacatcctcccctccagtgagcgtttcagtttaagcatacacaattctcagatcaagttagctacagacagggattttgctatagtcttggaattagagttctgaattgaatgcagtctaaggcccaagcctcccaaagcaggagcccatgcctttccccattctatcagggctttttttttttttttttttttttttcatttcattccagctcctgcaggcttcctcatgacacatattccacctctcagcacacagtgatctccagggtctccctgaggattagcaaagggagctccacatcctttccactgggcatatggttacctggaaataggcgtgttggtgcaagacaccacatccagtttcctccctttccactcccagagaacttctcagggatctggcagactgcgtgagtgtaaacagccactttgggttgtgttgcctttgctgctgagctgtgcctgttagctatgaaatctgcccaaatgcctcagacaaatgctgtatccaacaaccagcaggaatgagtcctctgatgaaaagaaatggaatcaaatcttcattatcagccctctttgcttcttctacctggccctttgctcattagccacaaacaccataagttatggagacctcagagctgattcagctgccgttacctcccacttgcatttctatagtagcttgtcaacgcatttcccttcttcactccaattcttcctactggttaattcttagaaaacaagacccttgccatgccgtcaacagcctttcaggataaagtcaaagtcaatttggcgttaaagtgccataatctaacctcattctaccgtctctcatctgcactcctaccaaccctctatgactcaggccccattctctcacgttttattcttggcctttctttctgtgaaagaagtcacctcccctggcctctctccccaccgtccaaaatcaagtctcctttatagctgcattcaagatttactttctttttgaagcttccctttcattatttttttttttttttttttttttgagatggagtctcgctctgtctcccagcctggagtgcactggcaccatctcggctgactgccagctctgcctcccgggttcacgccattctcctgcctcagcctcccaagtagctgggactacaggcacctgccaccatgcctggctaattttttgtatttttagtagagacggggtttcactgtgttagccaggatgatctcgatctactgacctcgtgatccacctacctcgcctcccaaagtgctgggattacaggcgtgagccaccgcgcccagcctcattattcttactctattaaaatcttcaaaatattttatgtactctctgcaattacacagactagtatttattctaacttttttttgtttgtttttgttttttgagatggagtttcactcttgttgccctggctggagtgcaatggtgcaatctcagctcaccacaacctcctctcccgggttcaagcgattctcctcctgcttcagcttcccaaatagctgggattacaggcgcctgccaccatgccttgctaatcttttttttcttttttttttttttttttttgtatttttagtagagacaggttttcaccatgttgaccaggctggtcttgaacttctgacttcaagtgatccgcccaccttggcctcccaaagtgctagaattatacaggcatgagtcactgcgcccggcctattctaacattttgaaatatttattgagcaattgagcacctactatgagcaagttgcactgtgtcagatctgccttcatatctccccaagtgcccggcataatggccatatttatccactcaatggatgcatgttgagtggaagggctatgttagactccttgggaagcaaaaagatgaatttttcatcacctgccatcatcaagaaattagtgtgttagaagacacaaggcatgtacatatgtaattataacacaatgtagaaagtggtaagcacccccaagaaatgacagagcagaggagagttcacagtaaagaaagattacctgcagctgaaggaattggagaaagctgccatggataaggtgttgttttagagggccttgaaggatgaataaaaattgaacaagtggtaatgtgggaaaagacattccagggagacagaaacaagattcagaaaagtgatgacagcataaaaaaggaactcagtggaaagatcaataaggggttgtgtgctgagactattctaggaaggctacgggccaggagcggtggcacatggctgtaatcccagcactttgggaggccaaggagggtggatcacgaggtcaagagattgagaccatcctggccaacatggtgaaaccccatctctactaaaaatacaaaaattagccatgcgtggtggcaggcacctgtaaccccagctactcgggaggctgaagcaggaggattgcttgaacccaggaggcagaggttgcggtgagggtgagccaagagcgcaccactgcactccagcctggcaacaaagcgagactccatctcaaaaaaaataaaataaaatagaaataaaagaaggctatggtgcaggaaagcaggtataagatggcagaggacccctggcatgttcatccatgtccatacggccaggagtcatcacctggaagcagtgctatgcatggagattcccagaaaaagagcactcattgcccaactcctggtcttgtgtgtctaaccaacttccccagcagtgtggctggtttctgccaggctgcatgttccaataggatgatggcctttaggtgaaggaaaagaagggctacaatgtgaagctacaagaatgctgtcagcagggagatgcaaggacaaagaatagctacattgctccgggctgagtcagaggcagactccttagggggtttttagggtgagtgtaagaacagatttctagattagaagcagtgtgaacctttgtccaagaatcagccatttattaccagtgtgcaaacctagatcccactagaaaccctgtccagctcaacagatgagtctgtatttgcacgttctggcaaaaccacattatagtgcagagatcaagagcatcgtgtttggagttattagatgtgaatttgaattcaggttcagctacttattttttgcgtgacctccttgggcaactcaatgtcatctataaaatgtaaatgagctcacagacttgttgtgaggttcaatggcatgatatttccaaattacttcaaacaatgtccaacaaaacaacagtagctgatgggaaaacaatgtgtgtgtgtgtgtgtgtgtggtgtgtgtgtatatatctatatacatatgtacacatatatatacacatatagacatatatagatatatagagatatttatatctatatatacagatagatagatagatatatatagagagagaaagtgagacagagtcttttcccaaacgtgataaataaagctccactgatagggatggcaatatgtgtggattcttgggccaggcaccagagtcagaatttcttccagttggtattataatgggaagaacaaatgtgaaagttaaacacagacctagatcacagaaaatttcactacttaagggagctatgatagtatgtcaggtacactcatagcattactgggtagatgcagggatagctatgatagtatgccaggaacactcatagcattactgggtagatgcagggggagctatgatagtatgtcaggtacacgcatagcattactgggtagatgcaggtggtgtggtgatctactttgtatttgggatatttgggggtttcccaaaaggttgcacattctcaaaagagcaaccattctatcattccaatatttcaacttgagttgagttttgtgatgttaagtagctatgtcaggtgcctagattggagcttgacagattgtaagatggggtgcctgcccatgggtggaggtgaaaagaatctgaaatttgcaaaagaatctcacagcaatcccacttcagagggaatatcataggccttatgcctccatagggagcccacctgcaggcccgcttggcactgtgtcagcagccaagcccagcccacccttgctcatatccacctcatcacacatctggtgctcacacctgattccactcccaagcaattccagggcatttcaaggttgtcttcccatgggtatgatttaaatagctctcaggatattcctgagttttccctattaccagcaagaggattagtcacctggagctgagcagggtatggtaaatgtgtcttttgtagtaattacaataacttcaagcagaacaaacacagctccagcatctccaggctcacacgagccaaagctgtcctgaagacgcggatcacagcaggtggcaggcagctctcccaagaagacctaaagtttgtctttttaagtgaatctggcagaagacacattgtttccctgtgtgggcatgacaaccaatgtgatgccacttttttttcaagcagaattgaaaatgaacatccttgccagaagtagggaagcagagcaggctcactggagaggagttcacacagacctgggctctcaagaaaaagagcactcactactcagctccaaggggaccctgagtcagggcttctggggtaaagggacaagactgagaaatagggaaagcaagagagtggacagaagcacaggaatcagtgacctcataatgtcatcagcaaccaacctgtcttactgggtggcggcgggggggatcccactttctgacaccaagagtcaaaggcctgcctctgtgcattgactttttcatgccaccaagatctaaagagctgtgttggaatgaattagaatgataactaatcttcaagccgaagtgccaagtgtgggttggatttgagattaggaaggaggggtgccttctttcccccaacacgctcatactcagatatatgtgaaatgctatgacccacaaacctggctacaggcccagaatatctgccactttgggccttaggaagaagagaagaagaagaaggaagctcagataagcaatccagtattatcaccatggcctcttgttcattttctgctacctcaagagttgattcatttacttatttattaatcattcaaaaaactgcacaagtacctccaaggagcctaagaaatattgtgctacggtaaacacaaaagcactgtcattgaactcaacctccagaaacattcaatgtataaatagttgaggaagagagccttacatgcagaagtatttaatgaactttgaaagagtgaatgaatgagacagagaagaagcaatatatgatgaagcaccaaaaatgaatgacagtggtgacaaattctccaattatcagaagagcaaagaactccattttgcactggaggacctgagtatggctttatggagatgaacctgagtttgttgttgttgttattgttgttgtttttgagatggagtctggctctgtcaccaaggctggagtggtgcagtggcatgatctcggctcactgcaacttctgcctcttgggttcaagcaattctcctgcctcagcctccaaagtagctgggactacaggcacccaccaccatgcccagctaatttttgtatttttagtagaggcggggtttcaccatgttggccaggctggtctcaactcctgaccttgtgatccacccgcttcggcctcccaaagggctgggattacaggtgtgagccaccacatccgacctacctgagttttatcttcaaggattggaagagtttgggagaagtgagaaggagaagaacaatcaaagtggaagatgttcttcccaaggcaagcaccgaggaataggggttttggggacagcagaaggaaaccagtccgtgtgagtccctggcatgttgagtgaaatgaaatgggcctggactatagggcagccttgaaaatgaagttccacctgcagcattgcccaaagtgtgggccagtttccagcagtcacctaagatgcttttaaaaagctgattcctagagcctgtgtcgaatcttccaaaatcataatttatggggtggaacgaaggcccagaatctttttaatcagttcctcatgtaattcttaagtacactagagtttaaaactcgttggccttaagcatctaaactttaacctggtggtagttaaaatacttgcaggctcaaggccaggatgacacagcattggagaaaccaggttatcatagcaattctggagtgtggtgatcaggccccagacatgagagttatagccaatatctatatcacctctttgtttttttgttgttgttgtttttgtttgtttgtttgtttggagatggagtctcgctctgtcaaccaagctggaatgcagtggcacgatcttgacttactgcaacctccacctcctaggttcaaacaattctcctgtctcagcctcaccaagtagctgggactacaggcgcctgccaccatgcccggctaatttttttacttttaatagagacggggtttcaccatgttggccaggctggtcttgaactcccaatctcaggtgatccacccgccttggcctcccaaagtgctgggattactggcatgagccaccacacccggcccacctctttgttttatactctcaggatcccattgatccagccattgtttatgcctttgggcattatttgtaccccccaactttcctttgactcactaaacagaaattgcttttgttatatctgccattgaatgatcatgaagaatggcagacaccaaatcacccttcctctgtttcacctactgcccactccaaacacacacataaccaaacacatgcaaacatcaatacatgcaaacacatacatatccacacagtgtatttgtaccacagagtcaactgcccacctcccttagcagataaacctgctaccaaacgtgaggaaactcactgtcagcttcttcagccttggctgctgaggcaagggtgcatgtgctgcttctaggagacctgctaactgctgctggtggtccacatgctctcagtgggcagaggggccccagcttgcttctctgcttcctgcaaacagccttggagctcaaacggagattgttttgtcactttgtggtcttgtcagcatatcgatcaatgagtcctgagcgctaattgttgttatccagctcaatccatcaggaaggctgatatccctgactgggcactgtgccaaagcccaggactcatgaagagagaaggaggagggactggtaattgagggagaggagatatgatcagttgataagtccagagaaagacaggatgccaaacttaacagactgcatgcatatccccgcagagaagagccctcgacaaaatcagagaattgttagctttgctattcggtgtacgtcatgaattctgctggcctcccttccacatcaacacatatcttcccacacgttccagacctccacccattacatagaaaaccatctgcccgaacccccacaggacatctttggagtacactaacgtagcatttgtcaaagctggttaatgaacctatgctggaaatttccatttgaccctctgtatcgactctccacccttctcagtgctcctggatgctgacctgtgggtattactttgctaggtttctcattctgtggctgctggttgggtttgataaatggggaatccccaaaagagagcagagagatggaggagagtgaagttgggacacttcattcccaggctaccttcctgtacattaatgggagtctggctatgtctctcaactaaagatcagaggaccctgtgtacacagttctccctgcctttgggttccagaagccactcctttccttcatcactcaggcccagtttggctaaagctctcacttctactagtcctggagcactacagtgtctcttgggggttccatacatcctgctaacacttttgaatgtagtccttttgttaaagtccccccagaataccccaatggatgtatatgtttcctgtctacactctgtgttaggtgaaaaaattgctctatggtcaaataactaataaaatgggttatttatggttggacttctcagtgcctttaacatgcatggtaaatgtctgagaggaaggatatagtatgcaggattcaaaacttacttaactcaaaaccacacccattcttacagagttcagagaaagtatttcatggaacccagatatataccaacacccaagggctacaagcaatgagatgcacagccaccagaaaacacaaaccttcttggagtgtcttctgcggagcacagagagactttgtaaatagcatggaagctttcagacaatgacgcataatgaataaaagtacaggcttgggaaagtcctgtctctgccaccaactctctgatcttggacaggttacttcacttctctgaacctcttttctcacctataaaatgcagtagctgaacttgatcaagagattttaagtttattaccagaggaaatgtttcttctaatgaaatcttaggtagaggcccagtacagaagacagatggaaacccagctgctctgggtgaggcggaggtcaggtgagtaggaggaatgctgacactccatcccttagacactatgctttaaacagtggcttttgagccacatccacacaaccctcaggtctctctgaagccagtttgggaaacagcatcctagaggcacctttcagtgactggtttcatgtgagcacaaggtggtcttcatatggaatcatgttggcccccacctgaaggaggcagaggaagccactgagcttatacttagagcaagaactgcaaagagtcccatgtggaatctttcttttttcatttctgaaaatgtgtcagtctggtacaacaaataactccctttattttgaggcaaaggaactttagaacctattttccccttctatgagatgtctttaataccaaatgactcatcccagacaatattctaactattaatatgtatgaatgagtctgaaatctggacacaggtatcattctcccaggatacaaaatgttcaacctaaaatgtatttggaattttactaataccaaaagatcttaagatgcctttaagctacccagggagtgaggacacaaccagagcttccccttcatctccacttccctctaacatctctttggctgagcactgaggtctccagggtactaggaagctagaggatgattggggagactgtgcccagaactccagtgaagctggtcatgccccagtaagaaggttggcaaatcctttcctcataaagcaattatgaagctagagaaaatttataaaaacagccatttcagtgctctggaaattgaccaaaggtatacaataatctgagaagcatttatggttgaacaactgctgaacttcaggtaagaacagtgaggggtttattagctctagacattcttgcccagagctgctccaccctccccgctgatcggtcagcacagaggttctacctgggtgggacagcctgtgagtactggcaactgctactgtggtcaaaacagactcagcagatttggggcactgtgagatacccttgccttctcatcacatatagaggagcagcaatacaataaatggctgactcctcaaccaaaacaacaatggccagaggcagttgggaagaccttttcacagtgctacaagaaaaaaaaaaaaaagcctgtcaaccaagaattctacatacagcaaaaataatcttcaaaaatgaaggtgaaataaaaacattctcagacaaacaaagactgagaaaattatttgctagcaaatctgaattataagaaatactaaggaaagttcaggctgaaaggaaacagacattaggacatagctcatttgagttcatgcatttgaattcacacatattaattgttagaatattggtggggatgagtcattcagtattcaagacatcttatagaaggatgaaataggttctaaaattcttttaccccgagataaagggagttatttgttgcctcaaactgacacattttcagaaattaaaaaaagaaaggttccacatggaaccttttgcagttcttgcctaagtgtaagctcagtgccttcctctacctccttcagatgggggccaacatgattctctgtgaagaccaccttattctcacatcaaagcagtcacttaagggtgcttctaggacagcatttccaaaatggcttcagagagacctgagggttgcttgcaggtgcctcaagggccactgtgtaaagaatagtgtctaggatggagtatgagcactcttcctactcaatcaacccctgcctctcccagagcagcttgatttccatctgtcttctgaattgggcttctacctaagatctcattagaagaaacagttccactggtaataaatttaaaatttcattatcaagaaagaagaaatttaaacaggaagacatttaaaacattagaaattacaaatatgtggctaatgcaagaggctccgtagacatatttttcttgtgtcttctcctaacttttaaaagacataaaagtatataaagcaataatttttatactgcattgttgagtgtaatgtatgtatacatatatatagagagagatgtaatatatatgacaatgataagacaaaggaggaggattcattgatgcactgttggaacaaagtttctacattctactggaattagttaattctgaggattgtgatgaggtgagacacatatgcaatccctagaagagccactaagaaaacaatttttaaagtataaatgtcaaaggaattaaaatggtacaatataaatagagatacatgccacgtttagggattggaagactggacagcaaagatgtcagttctctttaaaataatgtacagattcaatgtaattcctaccaacatccctgcaaaatttttttctggctatagacaatattattataaaattgataagaaaaggcaaaggaagtagaatagctaaaagaattttgaaaaagaaaaataaagtaggaggataagtctactcaatttcaagaaatatcatatagcaacagtaatcaaaactgtgtggcattggcagagggatatacatatagataaatggaacagaatagaaaactcagaaataggcccatgcaaatatacccaactgattttttgaaaaaggtgcaaaagcaatttagtgaaaaaaggtgatctttttaaagaagtgattctagagcaattggatatttataagcaaaaaaaaaaaaaaaacaaaaaaaagaacttcaatgtaagtctcctacctcatataaaaattaactcaaaatagatcaggtatttacaattggatattcataagcaaaaaaaaaaagaacttcaacatttaagtctcctacctcatataaaaattaactcaaaatagatcatgtatttaaatgtaaaatataaaactataaagcatgaagaaaaaaacaggagaatttttttcaggcttcagggatagaagagagttcctaagcttgataccagaagcacaatgtataaaatttaaaaattgataaatcagacttaaaattaaaacatttgctctgcaaaagactctattaaaaggatgacaagacagggtatgcactggaaaaactatttgcaaaccttctatctaataatggactaatatctaggatataaaaataattctcaaaacaggaaaatgcaatctgatttaaaaatgggcagaagtaacgacgagacattatactgaagatatatagatgaaaaacaagcaaatgaaaagatgtccaacatcattagccataagggaaatgcacattaaaaccacaatgagatatcgctacatacctaaggtataaatagctaaaattaaaaaaaaagaatagtgacaacgccaaatactggcaaggacatagagaaactggatcactcattcatttttggtgggaatgtaaaatggtacagtcactatggaaaacagtttggaagattttttaaaaattaaatatgcaggccgggtgcggtggctcacacctgtaatcccagcactttgggaggccaaggcgggtggatcacgaggtcaggagattgcgaccatcctggctaacagggtgaaaccccgtctctactaaaaatacaaaaaaattagccaagtgtggtggcagacagctgtagtcccagccactcgggaggctgaggcaggagaatggcatgaacctaggaggcggagcttgcagtgagccaagatcacgccactgcactccagcctgggcaacagagaaagactctctctccaaaaaaaaaaaaaaaaaaaaattaaatatgcaactaccatacaactcagtaattgcattcctaggtatttattccaggtatatgaagctgtatgttgacatgacaacctgcacacgaatgttgacagcatctccattcataatatccccaaactgaaaacaacccatatgcctttcaacaggtcgatggtttaaaaaaaaaaaaagtatgatacatccataccatggaatattcactactcagcaataaaaagcaatgaaccatttacatatgcaacaacccggaacaatctccagagaattacactcgctgaaagaaaacccaatcccaaagttaacatactgtatgattccatttctataacattcacgaaatagcaaaattataggaatgaacgatttattggttgccaggcattaaggaaggggtgggtgcaggaaggaagtgggtgcggctataaaagggcaacaagaggaatccttgtgttgacagaaatgttctgtacattgactgtgttaatgccaatattctgattttgatatagtactatatttttacaaaatggagaaactgagcaatgagtacacaggatctttctgtattattcattatagttgcatgtgagactataactctcccaaaataaaaatggtacaataaagacaacatttagcttgcttatatgtctgtgacttgggccaagttcaatagagatggctcatctccattccagttgtttcaggtaggacagctagaaggctgtgggtcagaactatctgaagtcttgtcccctcacagggctggcagtggatgttggctgtcaactgagacctcagctgggaatatcagccctttcatgtatccttctcatgtggcctggatttccttacaacttggcagctggaatctaaggttgagtgtgccaaaagaaagagagccaggtgaaagtcgtaacactttttgcacccagcctcggaagtcgtgcaaggttactcctgctgtattctattcattgagacagtcacacaggcctccagttacaaggagcagcaggaaaataagtcctatctaatgagtggatggcaaggttatgggagagcctgtgggactagaaatataactgtagccatttttggaaaatacaatatgccccggtctctaaagactgactttatctcttccaaacacacatgactgcccatagcaacctagtttatgtgtcatgagtacagtcatacagagacaccaaaactctctcttataatgatttctaatttctggagtagggacttgaattgacttaggttaagtcaagcactcatacttggtctagtagccctgacacctggggtctgggctttgcggagaaggcatgatcatactacacaactatagcagagaggagaagatactccaatgaagaaaggaccattctatgagaatgaggaatcccttttagctaattggacaacccatgaagtaccacataagatagaatactctttctgtgtcatcaaaagataagcataaaataaaatgacacagaaaggttagatataaaaggctagacaaagtttatcaggcaagtgcaaacaaaaaggaagctgggatggcaatataaatgtcagatcaagtggacttaaaggcaaaaagaaggcattaaataggacagaaaggggccagtcgcagtggctcatgcctggaatcccagcactttgggaggccgggcgggttgatcacttgaggtcaggagtttgagaccagcctggccaacatggtgaaaccatgtctctgctaaaaatacaaaaaattagctggatgtggtggtggaagcctgtaatcccagctactcgggaggctgaggcaggagaatcatttgaacccaggaggcagaggttgcagtgagccaagattgcgccacggcgccactgtactccagcctgggcaatagagcaagactccatctcaaaaaaaaaaagaaaaacaaaggacagaaagggttatttaatgtcgataaatggtacatgcgataaacaagacacagatagcgtcatgtgctttttgtgctgaataatgtagctgtgaaatatataaaactaattctgtaacaaatacaaagaggaagtgatgggaacacaagagtagtggaagaccttaacacatcaccctcagtctttgagagatttagtaggcaaaggatgaattaggatgcagaggaattgaataatggatttcatagatataataggaacctgctttaagagatatatgtcaattttgtactctaccaaaagaaaatatatcttttctctaagtactcataaaacatttacaaaaattgattgtatattagtccacaaaggaaatctcagtaagttccaaaaagcagaacttgtacaggctctgctctctgaccacagtacaatacaatagaaaattaatggcaaaagttcaaacaaacaaacccaaacattttgaattttaacactctactaaataactcttgggtcaaagagaaaactaaggctgcaattacagatcatttaggatataacaacaataagaacactgtgtattgttgctcatggaatagtgccagagagaaattcatagttaaagaccttatattgttaacagaaaagagtgaaaataaatgcatcaaagatttaagccaggaaatgagaaaacaataacaaatgaaaccaaagaaaattaggaggcaggaattagcaaattcaaaagtgtaaaataatgatgggaagagttaaaaaattatagaactgatatgtataagaggtaattctgtgaaagagtactaatatgaataaattactaatccagaaaacactgacacagaagattaagaagaaaagcgatccaagttcatatatgaagatttttgtgagtgatattttagttttaagctaaggaagtttaaaatgtccaatggatttttttaaagaaaaattgaaattgcaaattgaatttagaaattggaaagcttgaatgaatcactatgcaaggattgtgttgccaagtatgggaaggcaatatacataacattacatagttaagaatgtgggcctagcgccagcctgcctgggttcatatcccagcttcacctgttagctacgcaacattcggcaaaatattcaaactctccaaacttcagtttccttatctctaaactggcaataacaacacaatctgcctcccaaaattggtgttgtgcagttgatgaaataacacaagccaagcctttagccctgtgccaatagaaggaccccccgaaaagacactacacgtttttattgttgcattcctccgaacatccaaaaaacagatgcttcatgctatactgtttcaaagcatacaaaaagatggaaagttattcacttggttttacaaaattatcttaatacaaaagcttgacagggttagcacaaaaaatacaaatgttatttatgaatgcatatttcatatatatatatatatatacatatatcacaagaaaatagaatccagtgttgtaataaaataataagacaccagaatcaaataagatatttctcagtaatagacaagtgaatcgttcaacatgaggaaatctatcaatctaccctgtcacattgctaggcaactgacagtgtgttgacttagaaatgctgattttagttattgggctaaggaaatgagacatcgctaaagatgtgtgctcagggttgtttgatgtcacattattaaacttttgaacaatttaaataccaaaaataggggacctgcttaaatatgcttaaatatattatgcttaaatgatatatagacatacagaatagactattctatagatagaatattgtgaaaccatataaggtgtttcaaataatatttcaaaacataaaaatatactcaagacactttcatttattcattaggtatgaagaagattaaagtagtatatgcagcatgattacttatgcaaaaactagatatttttatctgtgtgcataagtaaatgtatgtataagcatttaggtggtttcatcgcttttactactataaaaatgccacagccaattgtctcacacaattgtcattctgcatacatgtaaagattaaatcatgctattttaattcattttaaaaactacagtctgtacaaaatgacacatatacaagattattcattgcaatgttatttaggtgggggagttggggttgagggtgtatgtaagcactcatataatcatccacaggcggaaggtaataaaaggaaatacaacaaaatgtcacagcggttattttagggttattctcatccttgtacttaacttaaaaatgttctccttaatgccaaggtaggaaaaaatccgctgttaatgaaacattttaagtgagattcaaacaaaaggaaaagcactgtacttgtaaatcaagacatatattgtttgtgacttcatctgttaaaaaaatacaacaaagatttcaattaaggtgtttaaaaagttctacatagtgtctggcaaatggtaggccaataatatatattcattctacttcagtcctcatttaaatgaagatcattgtgaagacgagtttttttaaaatgcctatgaaagtgttcagcacagagcaagaagcctaattggctatcagcaattattaagtgaatctgagtcataaataaccctttcctggtgatacctcaactctgagatggaagtctagaagtgtttcttactgactgccactctccagaaactccagactgaatgacctgggtttctcccatttctctgtgatcctgccatattgtttaaaaacgaacaaataaaccaaacaacaacaacaacaaaacctcattggaactagttttcttcttgcctctggaggacaagcaagaaaaaatgttttttaatctctctggattctctcttcttgcttaaattcaggtccagtgtagaactgtttcaatctttggcaaacagtttcttccctggcttcaacctaatctgtcttgcgaagggacagtatcttcatgtgagaaattgtggcctacttcccaaacccacccccactggatagtgtgcttgacatttttttttttttccgagacgaagttttgctctatcccccaggctggagtgcagtggcgcgatctcggctcactgcaacctctgcctcccaggttcaagtgattctcctgcctcagcctcccaagtagctgggattacaggcacatgccaccccatgtctgtataatttttgtattcttggtagagatggggtttcaccatgttggccaggctggtctcaaactcttgacatggtgatccatctgccttggcctctcaaagtgctgggattacaggtgtgagccactgcgcccggccctgttgtgcttgactatttagagttcagccttcaccaagggaatgctggatgattccattggtttgggaaattttgtctggtgggaattcacaggatttgtcttggaaattgagagtggagctaaaagaaatcttgacaaaaaggtctattatgggcctggatttaggagatggctacagggaagaggactttgggatacactggatatggagaatgacaggaggaaaatggtgacgatgattgaagtttcacattccaggcccacggaacaacagtaccatggacagaagcctggacaccagaataaaatgaggagctcactttgggacttaatgatttggggtgagggtaggaatttcaagggcatgtccataagcataaaatctaaccctacagatcaagatggaccttgagctagagttgtagatttgggaactattaatctgggcaagtggatgtaaaccttggagtagagctgaagtcttcacaaagatgcctgagcattatgaagccctggtatttacagaatagaaggggaaatgggacatagtgaaggagctatggaatgagtagccagagtataaggccaaaggcaggaaagaaggcttcagtcacaagatgtaaagaaatgaaagcagatattctagactgcaagaaggacagggctgtaacctgcggtttaggtaaactaaagcaaaggcctcatgcctcctcttccctttgctttagttgaaatcagatacatgcaacaatgaaaaacaagaacataatgttcagttgaagcaatcatagaatgccagagtgcactgtagtggtcagccacattttcattcaaacaattttaaaagcttttggaacgccttgaacttcagggtttggcaactgtaactgtgttaattgtgtggcttattccatctaagtggaatattattaataaaggaaatgcctttgaactattagactgtgtcatttaaaggcaggacagagcctagaatccaggactcctgatctcaggcagtggacagctcaggtcatcttgctgcatctcaggatgcatccagaccctcctgtataaaggcttagggacaaatcagagtcctgtaaagtggaagcgccttaagtcagggcaccctcattttggttaaccacaccctaatacccaccactcaatgaaatctgcttccccggcttagttcccccaccctgtccatgcacgcatgcatgcatacctgccaaacactccctactctccatccttctcctcttccacccacccctacgaagcctctataactagttggcctcatcccgagatgtgggtgggtcaccatggtgacagaggaaaccctgttgcagaaggagagagacagaaacagcaggggacgtttcttggagcctcatacaatgacctctgcctttcttagaagtgcttcctttaagtcagagaagcacattagaggtaaagagagatgctgttatgttggagagatagtggaatgcctgaactcttctttaaaaatttcttttctatgattttcaggtgatcatcaatataaccatccgattttgagcagtgttacccagatcccgccacatggtgagagatgattgagagcactctgcatttcctccttatttcgagtggcaccattctaaggatggatgcctatcagggcatcaaacacacggtcataaactcactgaagctaaggaggtccaaggagccacaggctcgccctcctccagggccacaatgctctaatctcacttgtaggctattttccccttggtgtttctgtctccgatatcagaatgatctcttgacataaacagaaaggggctagacccatttctacttgccacctgtatcacttcttacagtcataaattccatatgtccacagcaaggagtggaacaccctcctttgttcaaagctatttgtgatatcatttacgaaagacatgagacttggttaaactttatgatcctccccaggctaattaagatttgataaaactcaaaactgatttgggctttagcctcttggcagaaaaaagaggctgaaaattgttgagtggaggagtgttagcatagtgcccaagggttataaaactatgtttccctcttagattataatatcctcccaccagatcacagctgaacagagaaaatctatttttggcacctgctcaagacttgatagaacataagacagccacataaattgcgaattatcagtcatttttgtctctttgctgtgaaagagtgaaaacatcattaaaattttagtgagagagaaactcaaaacaatgataaatcctacaggctacctggtagagagacctaccactgttatgtcagattatggtgtgcctcagcactgaagttgagggatattataattaggaggaagagattggaatattttcatgtgctatgctccaggtggaaataaatgatgaaagcaatagtataatcagatttgtcaggttgtggggtctaaaaagttagaactgggagaaactggggagatcagtgaaaagaggttgataccagtggtgatgttgacagtgggaaaagaaaggacggttgagatatgaaaccttttgaagaaagaattggagaaagttccttactaactgaatgtggctgatgagagccaatgatgacactgattagaaaaatgaagggttttattaacaaaatctaaggaatcaggaaaacagtcagtatgtatgggggatggagttgtcagtgagtttggatctggacacctggagtttgcaagaaaaaaatattcaacaggcaggaatgcagacatgaagtctggaggaaggttagagctgaagatgtgagtgaagctttggaggcagtaacagaagcctcaggagtgggggcactctacactgaaagagaagtgcagaaggcagaggcagggagcctgggggatgcccacagtgatgaagcagcctcaggaagagccagaaaaggcacgcaaggagagctcccacttgctcagtcacactacccagctcattttcctgagaaggagccaacacaagcagactcctgaatacaacaggaggagccattcttccctccttctcttcctgtcttcttttttccaactggtgcaaggagatgggggttgatgagacctggtccctgcccttgagcagctcacaatgtagtgagagtagagttttctctgcattgctttcttggatgttcccttctttcccaggagctggcagagtgactatcaagcgaggagggggcctgagtctacttaattagtgttccacaaagagcattaattggatccttattctgggccaagcactatgaaggattcaaaaaaaattggaaagcaaggccctgctgtcaaggagattgcaatatttggagatccacaatcccaactcaagtcaaattattagagatgttagatactaaagtgggtggaactgactagaagagcaatacaggcttaaagaacagatattgtcgttggctaaaaagatgggacattggcacagcaaaatgtcttgagtgaggcgggaatttcatacagaagagtaaaggaggcatttctataggagggagagtatcccatgaaggcagaaggcaagggagagctggccttggctcaggggtatgtcctgtaacacagtggtggaacaagagtatccagaaagattgcatttggaagtgggtgagctgagtgatgccttgttgagagtataatgccaacaggcagaaggaggttccttcttctccagcatagccaaagtgaagagacaagtgctgagagatgagtggctattactccctctgaggagcagcactcccaagttcctgctcactccacttcctggcatctgtcctgatgcatgccaaggaggctctttctgtacagcatgttctaatggggatgtagagcaccctccaccccctcacatatgtcctgagctggcatgaacaccagctcactggctgagcttccctggctcagtccccagtgttgggggtgacaatgaaggcaggaaggggtagaaaagtcaggagtccccggtgcttggggctgcccttggacaatgcctaggagggcttctctgtctcccacctctcacacagtccacagaattcctgctttccacgtttccacactctttttgccaagaggtgtggcagtcctcctgcacattcgaccgaagttagagcctgccccctctcagaaattctttggccttgaggtgtcccaaacaaaaagaggatggaggaatgacacagcgagactatagccttccaactgcctcacttctgggaatggtaccaccatttcccatggcagccactcattgacttgttgtggcttctcctcctcaagtctgtgaagcactgaggcatgcttgtcttcttccccaggatctccagctctttctgtcccctcatcctcactgcctccctcaccggccctgcatgccccctctccagatgtcattcatctggccctgagcccagcgcacactgcactgggctcccatcagccatcctctcatctccctttcaccttttctcccacttttccttccattcttttccccagctctggcaatgaacaacactcctttccatctcttcagattcttgcacctcaatgctctatctcaggggaaggaaggagaaagtggggatgatgtgctatgcatttttgtctagattctttcctccagcagcttagagatggctaagggggcttcagagaaaggaattagagtaagataaaatagctctgtggctcactgtggcttgtcaggtgcagagcttggagaggagaaaggggctacatgagctgtggaaggatgccatggacggagcatgggttgggtctcagtggagctgggtcctggactcagttcttctatgggtacataaataacataagtcactccatgtcctccaactcaagatttttctgagcctgagagctaggtttgcctaaagctattaggaaaaggacagcactttcacacagaagtagatgatttttatgatgcccctcagctccatcaggcttacgttttcagcagataacccagagatgtactgagagagagaattcgctcctcagactcaagagtcgagtctcccattcacagaatggtgaactgtcttggtggtggctaaaacagcatctgcccctaggcttattgacaactggaactgagcatgagggaaactgagtcaatagtatcacctatgtccaagcacagaggtccaggaaaggaggatggggattcgaatcaggggtgaggcagaaagcacacctgccacagacatggtcctcattaatacaaaacacccctcccttttcttgcagagaagccacggatgaacaacatcctgacatcagccaccgagccctatgacctctccttctcccgctcgttccagaacttggcccacctgcccccatcctacgagtctgcagtaaagaccaaccccagcaagtattcatctctgaagaggctaagtaagttgaatttcccccaagttggggtctgtctctggggctccaagatatcttcctatgtcacactctcttgctccataccccataggacagctgtcaaatcccaagaataaagaaggagttgcaggatgagagaagagaatagacaagctctttgcttttgttccttatggactgagcccattctttccatacatagaaagaagaccatggaatcctcagattcacatccctataggagacggccttccaattcatgcaccagtttaactgcgggagaaagccttctcccagtcccgcacgcaactgccttcttcaaaccatgggccttccttgctgtataccctatactggatagaggctagcaatggccagaactttctctgagacctctcccagaggcccacaaaccagctccttctccaacccagccaacagtgtcttgaggacctgagatccttcacctcccatgcatacaccccatttcaccagttcaatccagtttatccagtgatgccagctctgcctcttgagtctggggagactctgggcatcaatgggttaaagatacaaaaatgtcaaaaaatttccctaaaggacagctcttcctccctggctttctggccttggaccttctcctcccattttcccaggagtctcttttgatgaccacccaactgcagttggagcctcaagggctgagcatttgcttgaaagcttcagggtaacctaccctgacagaagtgcagcccaagtccacatcagccacctccatggtgaaacgtggagtctctagctagagacgggactatcataacctgaggaatcatcccgaggtgatgaaatttggctcaggaggaaggatacccatcaacgaccccgctgcaccaactgaagagcagacagaattcccacacttttgcagagatctagaaggccatgtgtaggaggcctcatttctgaaatttggggcaatgcaggtttgtgtgtaacctgcaagttcaagtaggtttgtagcatgcaagtccaagtaggcttgtagcatgcaagttccaggcaaattcaagggtacagagagcagtgtgagcttaggagggcctgctggatagagagaaaggtggagcatctaaatgaggcgcacatgtaagattactccaaccagcttgcgttatgggcacaggtggagtgtgtgtaggctgattatgtggctgtgtggggactggaggcccatgtattggctttctatgcgttgcctgttactacagagaaggtgttacgatgttcctaagttaccagttaaacattttcacaagtgtttcctagtctgagcatcttactttattctagccggaggctggctctggacctcatcaggaagcttcaagagctgctatttggatgttttagtaagacagatagtcattctgtttcaggaccatggtgtggtagatacggcccaggaccaggcggagttcagggacttgggcttgctatcaactctgccctgaacacactggggattctgaggaagtcccttaacatatccctactcaaggtggtctatgtaccagaggcttttagcattacctgggagcttgttagagatgcaaactcttgggcccaccccagacccactgaattagaatctgcatttaacaagcccccagagaatggtttgcacattcaatgggaaaatacacccttcacccgtctgtcctaatccataactaaaggagtttgactgtattatcccttaaggttgacaggtctgtgatggagcaggagcggggcagggttctatctgagtcctggctgcagggtcaccccagttgccttctctcactctgtctctcccctgcagccgacaaggaggctgacgagtattacatgagacggcggcacctgcccgacctggctgcccgcggcaccctccccctcaatgtcatccagatgtcccaacagaagccgttgccaagggaacgaccccgccggcccatccgggccatgtcccaggacagggtcctgtccccggatcggggcctgccagatgagttcagcatgccctacgaccgcatcctgtccgacgagcagctgctctccacggagcgcctgcactcccaggacccgctgctgtccccggagcggacggcctttcccgagcagtcgctgtccagggccatctcgcacacggacgtctttgtgtccacacccgtgctggaccgctaccgcatgagcaagatgcactctcatcccagtgcctccaataactcatacgccaccctgggccagagccagacggcagccaagcgtcatgcctttgcctcacgcagacacaacacggtggagcagctgcactacatcccgggccaccacacctgctacacagccagcaagaccgaagtgaccgtgtgaccggcggggcagggccggggctgctgggcgtggcagagcagagcgggggccgggaggggccaggagcagagcttctagccttgccactctcccttcccttgtcccctctgtaggaagtgggggtgggccacctttgcccaaaaagccatacccccggggacacagccccgatggcctggtccaatacacttagacccaggaccaagagcaatcgctcttgctcctccagaagaatcagtggggagtgaggagggggctaggccccattctcacccccgaccaccttcaccaactccctttccgtcccgcgcctccttctccccatccgggggactcagctgcaggttctgtcagcagagagacccttgcttgactgtggtctgaagctgcctgggtttgaaggggccagcgggtccaatcagtgggctgaccggataggctactcggtctcattcattcatctagaaccgcatcacagaaatctcctagtgcctaaaaactgcctgctcgctctctcagagccagggagctgctgtgtccataagcacaataatgattcttttcttgcctgctggaactctctggtccccactgagtgacccttcctttgctgacccctgagggcccaaccctggccctgtgcccctcccctcaactccaggaccaggaggggttcccttccttcagctgcctccccattggtgggaactccacccccttccagctgactgcccgcccataaggaccctgggcctgtcctttcagcgggctgtgctccttccctggccctgaggatttcacccttgagttttctggggttttggctgtagccttcgcagaggggagtagcaatggggtgctggccctcccagacacccgatcatctccgcactccctccaggcctctagacctgaccatgactgccactcaggctgccttctccacccctgctctgctcccaggaggcacctgcggtggccagagagccagggtggggagggccactgtgatgtgcggggtctcgggctcaacattcgcatcctgcagggctccacctgttcccacatgcacctccggcaggacctagacagaagtttctagagagcagcttttcagcccccagacaaggaggatgagaggtggttgtcctgcatcctctccgctcatccttccttccccatctctgtctacctgctcagttcagagatcactcctactgcctgtgtccccttcccccacatcctccctgcaactttattcctcctagctgatccttcagatccgtgcctcctctggatcaaagggacaaagacctattagcaaaagcaaacaaaggtcctccaggcgactggcctaggggctaactgggcaggtccccacagcatcatccctttgtgcaggcactggggtacctggtagaccatggtcctcagctctgttgggggaccgccactgcccgcccacctcagcctcttccccgcctccagcctgggggttggcatggtgtgacggcctcctggggaggtgacagtgaattcagcagcatccgctcccccaagaccagagagcctggtgggggaaagaaggggttccctcattctcagggccagggcacccgctgggttggggctgggggaatcaactccaggctattgggtgaaggtgtgatcctaaaaacagtcagatccaacagcagtgcccttataaatggggttttacctgccctcagttctgcactcatggccctttaaaaaggcgagtgtagaaggagaatttattggtgtcagccctggagatttttaatctaaccaagtccacaaaccacagagaaagcaatggactgtgtcctttcactgatttcaagagttccaaagctctcatctccttctcccctctgcagggtgtgcctcccaacaggaacaggaaaccatcaccctggatcttagggggatggaggctgggggttgtgaaagccactgtcagaccccacactggggatgcattcctggagtcgtgcggctggaaggccagggactaccctctctgctttcctcccaacagacacataaaccttcttaagggctggtccccaggggtttataagagtttgttccagaaggtgaggctaagagggttggaaaggaagaagtgagtctgaatagagcaggtggctcccagctgggcccctgagcccagcacctttgaatcgtctaatctgtggccatcccttggaaggcaggatgctggtggtgaggggaaaggacctgagtggctgagaatgcccttcccaggtgtctacatgcaggtatacaccaaaccagaaagctgatcccatctccagtgtcaaagcttctcagcaccaagttctccagcccccagggtgacacttttccccaggggtcctccccaagccctgtctctgacagggtttctgtctctctcaggggttgttgatgagttgattccaagacatttctcatcccagccttaccactgtctggctgaaaggctctgatgtcagttgggttggaaaattctactgcaatgcttacttcttttcaaggatttcttctgcttcacctttgggtctagaagcaaggaatgaagggagggagagagggagggagggaggggaggagggaagaaaaaagaagtagagataggtctacagacttgctccaattcagtcccacatttcaaaatccagaaaactatgtcatagctgggacagagaggtatcccatttattcagctgtcccatccatcttcatggaacaagcaaagccacatcaataggcaagttcacgtagcagataaaagaggcttctggggctggaacctagatgccatgatttctagcccaaccaggctggtggcctctaccatacatagaagtaccatccacccttacagtaaaagcctccctcctgctcacaaaggaagcctaaagcccaagatttccctctccttgttttattcatttttgcacatctctgttgctctaacagaaatgaactggaatctgcacaggttctctcctgccctgaaagttctgcctggtttccttggcctctgatggcattgaagctttcacaatccctcctgcatctccaccttccctgtcttgctccaggctcctggctccatgccttcctgtgtcaaaaaggctttgccaagaattacttcacctcctaaccaggcttctgccctcagggctcccccagtgtcttgggagtgtcttgggccacacgactgcctcttagaaagttccaaccttgcccccaattcaaatttctcctcccctctttccactctccctcccagaaactcctgatttccagaaaacctcagatttccaggccaggtcactcattccttcctctcatctccctcttcctccatctaccttcctccattcaccttcctccattcctaatttcttttccctggtcttgctataatctccagctctaaaaatcagagctctcaatgaaaacaatggaagaataagacattctttcggtcttctgtttgcctcactggtgtatccttcatctcctgcccctgtgagttgataccccagtgcacggagccaagggcttttcccctctgagctctgggagggaagggaatggagctctgggtttgagatgtcatggcctgtgatagtcagtttggttcctgccactagcaagtcccctgaagctcccaacccagcctgatgttagcccagaagctcctgctctggccaaagactcctatccttgagggctctcagccactgctccaacacacttgcccccttcctgcttgtgtatgtcacttatcctcctttgtccacaaagacttgagggcctcctgagtctccaagcatggaggaatatccatgccaacatccctgccatcaaactcaatccattttcttcagagataccttgtctgtcaccagcctccaacttcatattccttccacaggcaactgtgcacttgacccaaggtaaaatgaaagggctgccaatcactcggactccagaaggtgcctgccctgagaagagctggcatgttacctcccacatacatttcctgtcatcctgtccgaatctgggaaattttgctctggagtattttcaagaaagcgcattgtgttttaatgaagtatttttcagggttccaatgttattttttataaatgcagcattttaatggcagattcaatatgaaggacatgtcttcctgggctctatatttgattttggaaggcagcatactctaggagaaaaaaagcatagggctgaggctctgaagacacagcttccagccctggctttgtctccgagggggagtcatgttccccactcagtgcctcagtttccccatctgtaaaatgaggggctttgactagatgagctctgaagtttcatccagctcttacactgtagggctttcattccctgccagcacctgctctccccgttcctccccacctccactgagctgcacacatcccacaatgcctgccccacagcgatgtcctcagatgtcctggacagccaccgcactcctcactagagcctggggtgggcctgatgggctcggccacccagggatgccctcgtacctgaagtttaagggcctaaccattcaataggtcaccaactgtgtgccatggaagccctcttgtaaagacacacctaaaccatcctaagtgactgtggaattctggggaattctgagtttggagtttccatttggatacggtccttatagctggagggaggcggttccaatttcagagagggagctggctggagagaaaggtctggaggttggcccataagggcatgaagtttgtacttgagggcagctgggaaattcatttcaagctgcagaggaacgtgttcacaggctgttgtgtggcaatgaatgtcatgataacccactctggaatatgtgtcctgaagaccaagtctggacactgaggctccattccaactggaggaggaggcatctccatctgggctgctaggaaggggcactcatcccatcctagtacctttgtagcccttcgtcatgacactaccgtcctcccggtgaaggcttgtgaagcaagaatggagagtccaagtttgtgatattcaaacccatcttgtaaatcagcaaacacattaaccttccatcagtcagagaaataatgttgtggctgtgtgtttccttaatgctctccctcctgagggaggagaagaccctgctcaactttgctgcccaccctgcagtgacccctgaatgccacaccatgggaggactcattcattggctttgtagtggcaaatattcctctagttctataactcaactagacattttgtagtaaagaattcttgaaattctctaataaaaagcaattcttactgtaatatttttagtttggggacacaatttcctaaggggggattaatgaacatttttatgcattagcccaatttatgaattccatgtttattatatggtagtactgatgaaaagtacctttctatctgtatctttgcagtttcttcgttactcatatgtaagcctcatggtaagcagtgctctagtaactgcttctctgtacaaatctcatcgttctacttacctgtcaaagcacattctacatgtactgtaaacagatacactttagtaagatttagtcttaaggatttttccacttttgtcagtaacagatatttatggattaaaaaataaagccgtttcaacataacgtgtgtctctttaagtagccacatgctgacttttacagagtcaaaaccaaaagtaattaaaaagcaagaaagaatgtagaaggtcattggagttgggggcagaaacaaagattaactgcaaataggagctagagaactttgagggtgaaaagagtgttttaaaactggattgtgctgatggttgtacaactgcataaatttactaaaaatcacaaaagtttatacttgcaatgggtgactgttatgatataccaattaaaccacaataatgctttctacaatgggtactatgaggaatgtgggaagacaagcctaggacaagtgtcaatggacaaggtatactaattcaaagtagaattactaggttggtgcaaaagtaattgaggtttttgccattaaaagttgaaatggctttattttataattaaaagtttttgccattaaaagtaaaggcagaaacttcaattacttttgcaccgacctaacagaagttctgcctccttatccatcctcatttagcccagaactatttaatattcttggacattaggtcttagtctggtctttgagttagttcttgtagttaccatggataattggaggacagccagttaagtatccaggccgtttaacccagagaatcaaattgcaccatgaaaattgatttagatttggagttttgttcaagactctctttttctggacatgtttttaatattatttctttggcacatgttcacttttgctgttaaagtcatctgttttctgtttctgaattttcaccagaacctcaataccagtgggctcaggttcagcaaacaaagttttgccaaatgggacagttgtctaaacacccaacgtcagcacctccacagttcctagaatccacagtcagtcacactctcttagcaactccccaactcccttgtaaataaaactcttctcattgaaggcattggacttatttccaaaaatcctctcattttctcctgtcattggcattcattacttaggacaaagttacaaacctgtttattattgtacattataacccataaccacacatactctgaaatgtatttactcattacaacaatcactatagcagtgcaattacatctaagttatagtgtctctaacctattatgactcatagctagtacacacacacacacacacacatacatatatgacaagtacaggaaagcttcattaatctatatccattattggaaagaaccctcatcctccccccaaaaaaaacccaaattctgaattggggaattttttttagcgaagtgtaatttaattataatgcttaaacatacatataatgactaaattagactaaaacatgttccctaatagaaactctcaggaaatattccttattgaatatgtaagaataatatgtgactaaaattaaaacggtcaagaggtatgggtcagagagctctcaatatgcttaatggtgcttctaaaatactttaaaagactattttcttaaataggctaaatatctccctttaaatattcttaactttaacaatttgttcaactttttctctttggtcctcaaaggtaaacctccattcagaccctgaccacagctgtcactaattccaaattcgtgagatctgaataaatgaggttttaatacaccatcattaacaagtcaaggccaacaaaaaactcatgttggaagctgagactctgggagttttggacagctttccgcctgcagtgtcactttgaacactaattttcttctttctcctctctggtttagcatgagaatgaagctcaaaacttctagggagtagcaagaaagatttccttcaaggatctaagaagacctcggacactcactatttaggctacaaatgttaggaatggaaaaccgagaaagggtttgggagcagaggctggaaaaggggtgccttgaaagtaccagaataagggaatcaatgacttttatgtgctggatgtgttgaccaatgtcatctctgggccttggttttctcatctgtaaccatcggagaatttgatagactcaagatccttccagtgtctgatattttatcacttaattatcacaaaacaatactcacattgtatctgggcttctaggtagctgaaagggcttgtgaaacacccatcctgctgtcttcctcagccctgtccatcttaactttcccatccctatcaaaacaggatgccgttgaagagtactggactggaagtgaggagaccttgtttcttgtactggctctgccaaaattttgttatgtgatctagaaaaacttatttctcctcttcaaatctcaacattatcatttaaaacaaaatgagtagtccagacgaggcagtctttaaaatgcgtctcagcttctttagtcttggctttggtgactttgccaagacttgacaaggaattggggagcttagctggtgtggatcatggcagaagggtagagtggatgtggagaaggagaaaacccttagctggagccatcacgtatgaggtagtatcttcccagttgtcagcatggtctacccttgtgtcaacaaatcgctatagaggaagcaaaaatattgaatgagaggaaaaacaaggtcctcagaaaactgtctcttttgtttgacttttttgtgatttcccaaaatctacaaactgcctttcaaagaaatttcaaataatacattttcacagaaagttctcagcagttcattattttacagtgttttgccattagaaatagagctcatatgtgtgtgcaggaccagcactctctccacaaagaagagagaattttttttttttttttgcctccagcctctatccaagttctggagatgtgtggcaaaggtagaatactaaggcttttgcccttattcccaagtgtgtgtaccttaatgcttctttcctggagcatttagaagagctactcttactgtttcaccacggcaatcatggagaagatctcctctgctacataaggcagggggtccgtacattgtctttattttagacttagagaaaactaaaaactgtcatctaatccagtgctactcaaagtgcggtcgctagaggagaaacatcagcatttcctgggagctcattgcaatgcagattcccagtgcccaccccagactttcctaatcagaatctctgggggtagggccctggaatttgcattttaacaagatctttaggtgactctatgcacattaatgcttgagaagcataccattttgcctttttttttttccagttttgaaattttataaccccatgacaaaaataaagacttggatctctggggatcagagtagccttggtctatgtagcctgacgattttaggcaaccagcttcagtgacaagattagaacaaaaatgggtgtacagaggattaagcatttaggaaatgaggagaaagctgaggtagggtgtataaactcaaaaagtttaatagaaggccgggcgcgggtggctcacgcctgtaatcccagcactttaggaggccgaggcgggcggatcatgaggtcatgagatggagaccatcctggccaacatgatgaaaccccatctctaataaaaatacaaaaattagccgggtgtggtggcacatgcctgtagtcccagctactcgggaggctgaggcaggagaatctctttaccccaggaggcagaggttgcagtgagctgagatctcgccactgcatgcactccagcctgggcaacagagtgagactccatctcaaaaaaaaaaaaaaaaaagtttaatagaagaaaaattatgtggctattggacagcatcataaagatgaatctctaaggattccccaaaccagagtgtcaaaatttaaagtcaatggagaacaaggaaaggatgggaatacacaacaagatccatttcctcaggcacagcaggaggacagagtgggcagggctgctccagtgcagcttctcgggaaggcaaaatggcggccactatgagagatgaggagaaagggctgctcagggtggttttcctggagggtcccaatcttcttggtagtctatgagagggagtcattgaatcaggcaggataaggtggattctgctatggtgataaataactcccaaactccttaagacaccaaaggattatttttcactcccactctgctgtagatcagcgaggacctctgtggtacttccccatccttactcaaaagcccagaaatagggaagcagcctctatcagcaatgttaccatcgtccacggcagagaagaaagagaactctagggggccccacaaggacaattaaatggcagcagagagtggcacataccacttctactcacatcttcttgtatgaatctggccacacggacctaccccaccaaaggggatccaagaagtgtgattctaccttactgcaggataatggaaaatatccagtgagcagcaccaatgactaccatagtcaccatgttgagtttagagcaaaagattgggaatttatgattgggaaggtccccttccctatcaccatgataaaaccatcaaagtgttcttttttaaggcaggtgaaacatttctgcagccgacttattatatatgaagccagtggtttcagagcatgtacactgaacaacctctttatgataagacatctatgaagtgttgagaaagtatcccataaacagatcatctgttcttcagttccaacctcagggctccagacaggacagtggatatgaaatgctaacagtagattctgtggaatcgcatcaagatattctcctacaacatgtaacgatttcacactgtggtggtttctacccacccccctttccttttgccatactcttttcctcactactccaaacaacagtcaccctccatctactctgctctcagggaaaaggtagttagacaccagaggaagaagtctttgttcaaccttgactttcaaaatagactttttttcaagcccacagggcaaaaattgtcatgtaattgcaagagccttatagtagaaagagaaagtgttttctctgacaatgaaagctgaccttttagtatcaatgagccaagcttggaaagcttgagtttttacaataagccacagagtagacagcatataggatatggtggaagagcatgtcctgctatacaaggcaaagagaaatatcctcctgcactggggaaaaacctcaagtggaatcaaagaaggcagaaagaaagcaagatatgtgaatccctgagatgtcctgatcacccactatggggtgggctggtagggaaagagggagcggggaaagtggacaactgaatcctccagatagattggagaatctgagggtagaacacatttctgcctggcttccagcctagatcttagggaggtaaattcctaatgaatgttccatgccatcatgacagtgatggaaacatggaaacagcagtgagacaggactactgtctgtcaggacagagagacggtccttcactcaaccccagacttccagagctcctaagtgatacccagaagacaagtaccctggctaggaatttaaaggctatctccaaagactgcatatctcagagctcacaacagcagaagaccaccattacagagaaatgaaatgaagtacaaatctacatatttgagttacagccataaagtgtaaaacaggcacatcaatatcctaagacccaaagtctttcaagagtggttctcaaaccttttggtctcgggatgtctttacacccttaaaagttattgaggaccacaaagagcttcacttgtgtgggacttaacaaaatacaattatcatactcaaaattaaaatagagaatttaaaatgtatgtattaatttattttacattaagaacagtaaatctatgatgtgctaacataaataacatatgattatgggaaataactatattttccaaaaaaaagaattagtaaaaagagtggaattgttttacattttttgcaaagttctttaatgttgtgcttagtggaagataaccagattctgatgtctgcttctgcagttactctcttgcagtataacatctcgtgcagcccccaaaggcagcctggtgaacacaggaggaggaagggaagctccaacagaggaaagagaaagaagcccattttccccctgccactggtcagcccaaagtaaaactgagttgagggctggaagaagctttagttttacagtaatttggaagctgttaatattacaatggtctgggactactaattattaggctgggaaattacaaaatgactttctattttctaacaataacctgaaaagtagggaatggaaaaaaggaatgaaatttcttactggtgacacacttgggtttacttgcttggcataatggttatacaagcaaacacacctggcaaaggacctgtgcaaaataccccagattgaggaagaaggaacgttgtactaaagacttgaaggaggggcatacaattacaggattaaggaactgtatgagatccttgatagactacaagaagagaagataagtcttttacgaacgaggaacaatcttcatgagagaacaagacaggatagaaaggagacgagattcatggacatctgggtctttgccttccatcgatcatcctggccaccatcctatgtcccccacacctcttgataacagactccaaccctacttcagtcaccagtgtaggcaatggctcaagccagaccaactgcagtctttttctttaatttccagacagaaatgtaaagagagaaaatgtcttccttgtcagggactggaccttaatgatacaaatctagggctaccatagccttgtcctacactatatggggaaagaatgaaggtgatgaaagaggaataatgatagctaacattcactcaatgctaactgtgcacttggtactatcaaagcactttgcaggcattaacccactgaatcctcataccatctcttatgaggttagaactactgtgtgtcccattgctaaggaatttgcccacatcctaaggaaaaggagaagccattgatgggccatgggatgtatgggaggaagattaaggtcacccttcagaagatgactagagctgtcctgtagaacatggatttgatgaagttcatgttgaagggcaggtagaccagtgaggagcagtgtggtattatgctgagacatgcaccaaatcagagctgtaggtgtggacttcaaatttcagttgcagagagcaacatagtggtcatttaaggattctgagtcattttctggttattttaaaattatactgaccaggcgcggtggctcacgcctgtaatcccagcactttgggaggccgaggtgggcagatcacctgaggtcagaagttcaagaccagcctggccaacatggtgaaaccccgtctctaccaaaaatacaaaaattagccagaggtggtggcgcactcctgtaatcccagctgctcgggaggctgaggcaggagaattgcttcaacctgggaattggaggttgcagtgagccgagatcatgccactgcactccagcctgggcaagggagcgagactccatctcaaaaaaaaaattatactgaatgatctgaattattgatttttaaaaatatacactaatatactacttagcagtagcttgcatttatcacaaatcctctttctatttatcttctatctaggactgtgattattctgatgtatagtatgcttaaaagtcaggattgtgtgtgtgtaaaatgtgtagataaaagaataagtaaatatatcaataagtaaattatgttggcactgggtggtgggactctatctgatttatagtgatttatttatatttctttttattttctatcatttctaagcatacattatgcctgtgttcagaaaataatcagtatttgtcatgttactaatatcataggatcattatatataaatctataataaatgcatatatgtataaaatgtgtgtacatagatcatccctgacttatggtggcttgatttacaactttttgactttacaatggtatgaaaataatacatgttcagtagaaactgtactttgaattttgactttttcccaggctagccttatgtggtacaatattgtcttatgacgctgggcagtggccaggagccacaactcccagtgagccccaccatcacaagggcaaacaaccaattcaagggcaagcaaccagttctgttctctacagtgtactgttttcaataaatcacataagacattcaacacttcattagaaaatatggctttgtgataggtaattttgcccaactgtaagctaatgtaagtgttctgagcatgtttaaggtaggctgggctaagctatgctgctcagacggttaggtgtattcaatgcattttcgacttacaatattttcaacgtataatgactttatcaggatgaatacccatcaaaagttgaggagcatctgtgcatatgtgcatgcattcgtgtatgtgtgtgtgtgtgtaacaaaataactagaagaaaactactccaaattactaacggtgttagtgaatcttggtaatttttaaatttctttttactttaatgtatttcccagttttccataataagcatgcattacttttttaatggaaaaaacaaaattcattcttttaatattgaaaagtagtgaggttggagggctcactttaaacaaagatgccacacctccctgaaaatggagcagcaaatgttttggccattctccagcagggccttctacataaagaagccacaatactcacatgatggttggcttaaattaggaaaactcagtggaactgggagcaactctactgagcatccaccttaaggtggatctttgccccctttttctttgtttccagggcagggcttttatcactggataattagctctgccttttttgtaaagtacttctagctgtgactggggaactggtggattatcagttgcaacagggccaggtgggctggatgaatgtcatgccctctccagtctgtccagaccccatcactccctactggattccttataagtcaattactactgcctttaaaaagaattcctgtccaggtgcggtggctcacgcctgtaatcccagcactttgagaggccgaagcaggtggatcacctgaggttgggaattcgagaccagcctgaccaacatggtgaaccccatttctatgaaaaatacaaaattccccgggcatggtggtgcatgcctgtaatcccagctactcgggaggctaaggcaggagaatcacttgaacccgggaggcagaggttgcggtgagccgagatcatgccactgcactccagcctgggcaacaagagtgaaacttcatctcaaaaaaaaaaaaaaaaaaagaatttctatgctatctctgatcttagcctaatattatttatatttgttagagcctttaggaggtggcgagtaccacgtcaaattagagaacaagtcccatctaaaaagagctgtatttatcagctgcagccaatcattataaaacagaaatgccagcccaaaatagcctctatttcatatttttaaaggattaaaagacactgatttttaaatgatgttaatacatttgaaaaaaaaaaaaaaaacacttcctgggccaatgagttctagctaaatacaatagctttgtgagccatgatttgactagtcaactaaaaaaatacatgacctccaagtcaaatagtcagtactaggattccttgttttcccatatctgtagcagctcttaaccactgatattgaattctatgcatggcacctataattctgaaaaataggtctggtgcccataaataagtaataccttgacccaaaaagaatggccagggcatttcaagaacccacaagatcatggaccagaattgttagatataaacatctcctttggatattgaaaattgtggatgcaatcacacttcctggtaggtcatgagatttaggtttttagagtagaaagtattggctacataaagggtcattatacaataccgggcagagcataatctatacgagcctttgacagagctttgagcaggccttgagacattttccttacttccaggatgcccttttaacagaccagtaaagctctggaagattctgagccggaccagtctttgttttcactgtgtagctgtgagactcctgggaagctatgtcacctagaaaaagtcattgtagcagtaaattgaaatcatgtcaaaatatagcagaaagagaaagatgaaataccaaatcccaaacatctaaatctctccgcaaactgtcacctctaactgcaaaatcttagagggaaatacatgcaaccagaaaagaacaaagtaaagaagcatttatgattatctagggcaatgtagaattttagtgaactaaatttaatcagaacactcaggccttaatagacctaggcaactccatttcaaggcatgttccaggtgagcttatgctaaccatgggggagaaagatctcaaaggaagaaaggccaaataggaaaaaaaaaaaaaaaaaggcaaaaaggcctgcctttcttctagaaaagaatacctccagcccagtttcatttatccaattctagccagcaagcatgttcaacaagtatttgtgttcgggcagtgggattggagggaagatgggagagtgcagtgtggagaaccaaagtgaaattgtcggaggtctttgaaccagagcaactccatcttgagtatggctgggtaaaatgaggctgaaaccttctgggctgcattcccaggaggttaaggcattctaagtcacaggatgagacaagaggtcaacacaagatacaggtcataaacaccttgctgataaaacaggttgcaataaagaagccagccaaaacccattcaaaccaagatggcaaccagagtgacctctggtcgtcctcactgctacactcccatcagtgccacagcagtttacaaataccatgacaatgtcaggaagttaccctatatggtctaaaaaggggaggcatgaataatccaccccttgtttagcatataatgaaaaaataacaataaaaatggacaaccagcagcccttggggccgctctgccaatggggtagccattcttttagtcctttactttcttaataaactttttttcattttactctatggacttgccttgaattttttcttgtagaaaatccaagaaaccctctcttgggatctggattgggacccctttccagtaacaaaatggagggggttggcccctgttttcccagagagcaatccttaccctctcttctcctcttgacacgtgaaggaagagtgtctcttgtggttcactcaaagtttaacctctttaaaagttccaaccccctaggactgggactctgtccaggaacttgtccaatccagatcagaggtcctcctgttttccatggggcacaagaggaatagagactatttagagaggagctgtgagcttcccctctcttggaggccccacattctcaaattttcctgttaacttatcggctcaactcgagcttaggctcaactattgggtgctgctgtgcttttgttggaaaatcagtgaagtctagagaaatcccacagttttggcaataccttcatggaccgccttcccagctgtacagatctcctctgaccccatgaggatcaataaagagagcaactcacccctcactgctactgtgattgtctctttgattttgctctcagaatctgatgaaagaggtaaacctaagacagtgaaaattaggtttgcctccaggccacattaagccaagcatcattgtctcttctgtttctccacagaaattacaatcagctccaactccaaataagctcaccaaacaagtgtgtacaatatgcaccggaaaacaatctgacaatctagcccagatagagcagcatcttccattttaaatgtacaaacttgctgccatcctatgaggtttcacatgatgggccttgctgctcccactgaaaaagacaaaatcttcctgtcttcgtatttgccagggtgctggtcaacacatgcaggttatctgtgtcatctatgacttgtgaacacaaaactcacttgggagaaatctccccataaagggcagtaggtagcaccggagagtggtaagggctttggctccagagcaaggccacttactatctagagaccatatatttaaacttttcatgcttcagtcaacccatctgtaaaaggggattagaactgtcctcggtcatatggtttttgtgaggatgaaataagttactatgtgtagagcacttaaaagagcacttagcatagaataactcaataaatcttagaagaaattgtgactaattcccatataatggttgtataaggtgtcgtgggggtggtaagctatataaatttcctcctgtctcaaagagtgaccattctaaacaatcctacatccttgcaaaacctagacatttgcaatggttatacctcctgtcaatcagaactttctagagactccctcatatatttaaaacatatatatatatatatatatatgttactttaagtgggagggtacatccagtctgagttaatccatcttggatggaaacagaagtccctgaaagcaacatatttcaagttttaaatacatgagggagcctctagaaagacctagaaagtttcatatatatatatacacattacacaaatatgaaacaacaggcttgaagaaattgagtatcaggcaacaaaggacaatgatccctgcaagaaaagaaacagatgaggtgagccatatgattgtcccagctcattgcctagaaagagtttaaaaatgaaaagacaagccacaacctggggaagaaaatatttgcaaatcatgtatctgagaatggacttgtatccagaatatgtaaacaattcccaaaagtaaataaattggccaggtacagtggtgcatgcctgtaacaatcccagcactttgggagtctgaggtgggaggattgcttgagcccaggagttcaagatcagcctgggcaatatagagagactccatatctacaaaaataaaaataaaaattagccaggcatggtgatgcatgcctgtagccccagctactcgggaggctgaggtgggaggtccacttgagccctggaggtcaaggctgcagtgagccatgttcagggcactgcactccagcctgcccaacaaagtgagaccctgtctcaaaaaagtaaaacaacgggttcaactgactattacacaatcatgtgcataaccttcctcttagaaaataggaggagttgtaatttcaaatttttgtgcaattagattaaatcataatgcaacaacaacaaaaaagtaaaacaaaacaaaacaaaaaggaaataaaccaaagagcacaacagaaacgacaaaaaaggaggccaaatacttgaacagactctttgcaaaagaagatgtacagatgtcaaaaaaacatgaaaatatgctcaacatcatttagtcgttcaggaaatgcaaattaaaagcacaatgttagatactactccaaaccattaaaatgaataaaatttaaaaaactaaccatacaagagttggcaaggatgtagagaaggagaactctctcatttactgctggatggaatgcaaatggtataaccactttggaatatcgtttgacggatttttttaaaaagtgaaacatacatcgatcatataatctggccattctatttcttagtattaatgcaagaaaaatgaaagtatatggccctacaaaaacatataataggcaacaactagaaacaacccaaatattcaacagatcaaggtataatgtgtgtgcgtgtgtgtgtgtatatatatatatatgaatatatatatatgaatatatatatatgaatatatatatatgaatatatatatatgaatatatatatatgaatatatatatgaatatatatatgaatatatatatgaatatatatatgaatatatatatgcatatatatatatgaatatatatatatagagagagagaggaatatatattatggtaaatccatacaatggccatagtacttagcgaaaaaagaaagaaagaaagaaatgggcttttgatacatacagtgacttgtacacatctcaaaataattaggctaagtgaaagaagccagtactcagtacatagtgcatgatcccatttatagaaaatgtaaacaatctaaagagacagataataggttagtgtttcccagggggttgggagatggggcaaggagaggagaaagggagagattcgcaaatggaaacttcattggtgatgaacttttgacagtgatgttcatcatcttgacagtgttgatagtttcgtgagtgtacaaatatgtcaaaaattatcaaactgtacatattaaacgtgggctgtttgttctatattaatgataccttaataaagcagttaaaaatacatttgccttttaattcctctttggtgacgtctaaggacataaatacactatattctatggagcaagaattcccatatataacatatgagttacatatattcccatatacatatatatatatatatatatatatatatatatatatatatatgtcaccataggtcacagaggggaatagtgtaataaatacattatatcctatggagcaagaattcccatatataatatgagagttacatatattcctctatatatatatatatatatatatatatatatatatatatttgtcatcataggtcacagaggggaatggtgtaataaatacactatatcctatggagcaagaattcccatatataatatgagagttatatatattcctctctctatatatatatatttgtcatcataggtcacagaggggaatggtgtaataaatacactatatcctatggagcaagaattcccatatatataacaggcacctctccaagcacatctgcaacccctgatcatccatgtggaattcccacctcctgcaattccaactgccttcgtcaggctttcttagtcttgtgctgtatttacattacagtggccaggcaggcccttcctcctgaggcctatgaatctgccttacactcatatttcttcccaaacgcagacattataatgaagtgtttaaaaattagacttgggaatcagcctgcctgcagcatcattcaccagccgaattatattgagcagtaacttaacctctgggcttttcttcatctgtaaattgggtatactaataatatccctcttataaagtcattgaagaggaaatagttttaatagtgctgagaaccgtgccaagcgcatagtaagaattcagtaaattctgcccacagagaaactacagaaatgatatggctgctcatttttttgaaatacagggcatggaaatattcttattctttttctgcttattttcccagaaaaaaaaaatcatctcaatgttgtcttcagagttgtctacaaaagtattgattgtttcaacaaagcccattgatcccacctacttccctgaggagggtaattccacccgggggaaatccaagccctacctgcccattccacccacacacaacccaatgctgcccttggtatatctcgtctgccaccagcttttgcccaaaaagtcgacaccatctatctttgagacacgttctctcagagcgtggggttcaatctttccactcacagctctgccaatgctgaaactcagtaaacattgccctgcagttccttctactgatattcctggacttctttctcaaatttctgcagttttccctctacttgcattgtcatcacaggtcacagaggggaatcgaggagacagaattccacatataatcttatcttcctgtagaagtcccatgatccaccctctgcaagctgaagatctggaaaagctgatggtgttatccaaaggccatgatgtcaattcccgcctggaatctgaagacctgaacacaaggagtgctgaggacaggaaaagatcaatgttccagctgaagccgttaggcagagttaattcaactttcctcctcctccttctggttctgttcaggccctcagtttattggatggttctcccccacactgggaagggtcatctttaaggaatcagtccaccaatctgaatgctaatctcttctacaaatgccctcaagccacaccctgaaatagtgtttaaatggctatctgggtatttcatggcccagttaagctgacgtatagaactaatcatcacacttcctataagtttagaacaccttatttgatttcttagattcaggctttctctggaggaagggggtggatcttccctctgagggaaatgactttcctcttctatttagtttttctggtaccaccatcctctataaccaaagaacaactaagatatccctagtctttccagtccagtgattttaattgcaggcactatttaatggaattttcttaaaccactaactctataatattttcatttggttttctccatcccagatcaagaaagaattgtattccccatgtagtaagtgcccctgtttttcacttatctttccactgatcaactcctcccactggggctctgaaaaccacaaccatgattaggaattacctaatatccatgacacctaatcaagaaagaaagtggtaggggaccccccactggcatcttccagccaaaccacatagatcacacagggatgatccctttgcttgtcggtgccactattctcccaggacccctatctccctgagattgtggcttacgtgacacacaatggagccagcccaagagcacatggtgaggaatgtgtgggcaactgcagtcaaagttcttcaatcctactgacatttaaataaggcattcaaaacaaagtggaaaatctggggacgctaattcaagatagctcatccagtctgagatcaaggcctgaaagttccaagtgagaagctgaatatgcaagcagacaatggccagaccatatttaaaaacagaacttcaacccatagtctctgcagccacaagcccaggaaaccaaatcacaacccctgcagcaataggcctcaaatagtcaggacttggtcaatgttatgtctaattgtgtaagtcaatttgactgggttaagagacacccaggtagctggtaaaacatttttttctgggtgtgtctgtgagggtgtttccaggagagatgagcatttgaatcagtagactcagaaaggagatctgtattcatcaatgtgggctggcattgtctaatccactgagggcctgacaaaaacagaaaagcagaggcaagttcacgttcttttcttgagctaggacatccatttcctcctgcctgcggacttcaaagctcctggttttcaggttttctgacttttaaacttacactagaggctcccctggtcctttggccttagaccgagagttacatcataaacaacaaaaagttatttctcaccgttctagagactgggaagtccaagattgaggtgccaggagattcagtgtctgatgaggaggcatttcctgattcatgaaatagtgaaatggatttttgaagactcagttacagcatcagctaggtggcgataccttgcagggctggctcagggttctccagaaggctgtatatactctgaatcagcatccagtatacagtactatttctccaatagccagaattcatgggtctaggaattaaggggtagaaattggagtggcaccactcaccattaccactagtgacccattaataaaaattttgcttcccattcctgtgacttcacgctgtgctggcccagaggccagaggaaggagtggtgtaactctcagtccaatgttgaagacctgagaactggcagggctactggtataagctctagagtccaaaggcctgagaaccaggagctttcatgtccaagggcaagaaaagatggctgtcccagtgttacaggacctttggggtgttgcttttctggctggaaacctgagtccaatggcacctttgccgaacttttgcttgggtccactgggttcattctgtccacttggcctggcaggctgcacttgtttcatgctacaggcctggatcccatacctccaaggagaccacaagtcaggcatggagtagtgaggagtatgtgagtgagcgtggggtctgcaccctcagacatgccagctgctgctacaaggtgggcaactccagatgccagcatgggcagcggctctctgcgaggctgtggctggaccaggcacactacaagcagcttcccctggctggcaccaaggaatgtggtggtacccggaagcttggagatgccaggcactgcagggccccaaagagggagtcacagcagtccccaagggtcctcagctcttctctccttctccttgttcacaacgtagagagcaagggtcatgtttcagccctgtttgtgttacagctcttttagtctcaccatttggtgggtcctgagttcttgtcctatgaccaggaagaatgggttatgcagacaagtgaagggtaagcaagatgaagcagagcttcattgagcgataaaacagctcagtctctcagctcctttctacagccagggtgtcctgttggagtgttcagctcctagtagagagggtagctcctatcttcaggcaggtcactccaacaagtgctcagctcccagcagaaatggtaactcctctctgtagctggtcatcctgatgagtgttctgctcttggcaaagagggtatctcctctctgcagctggttgtccccttgtctgttctgctctggctgagccccaggcttttatgggcctcagagggaaggaagtatgtgccaattagtccatgtgctgatgggcaggcccagaaaaggcactacaagttcccactccagtccacaggactggcagcccagccctcagccttcaggccctccttggcctgaaggtggggcctcaccaggaacccgctcctttccacccaagagcctgtctgcctcctgctgccatccatggcatccaggctgctcacaccaaggggcacctgcaggccagtgccaggctgtcttcagcaccccctcagtcttcctcctgtgcttgtgggcacccaaagtccttcccaggcccccaagagtgcaaagaggcccagtccacagccccaacttgggtggctacagctgcatcccggtggatcagggctctgcctgctcccagctcctgctggctccatggaatgtgcagccctggaatctgtcccctcgcagcttgggataggggctccaggtccttgctgggcccaggctggtgtccagggatggagcaatgttgccacgagctcccccagtggcccaagtgctcaggggcagcccagggctcccccttgcctggtttgtggccctgcccaatgtggcacctctgggagcagatcacgggccacaggcctcaggcccagctgtctggagtgtcaggtctggtggtcaccccaatgtggggcaaaccctggggacacaacctcctcccaagatgcaggaacccggtgctctaaagtagggtgagtatagtggctgcaccacaggccaggtccctgaagtgggcacttctcaccctggaaccccaaagcatggccccagctctgcaccccgggcctggcccctgcgccccatgtgcacgcatggcactgtcctgggcccagctccacctcagggcccttttctgcccaaccgcactgttcccctgctagcaggtgacccagcccagccccatcatggcagcccccagagcagcagtctggggagttgggggactgcccacctcctccccacaccctccctgcagcagcagctgatggcagcagcagcttcagatggcccaccactgccatcaccttcttggcccaccagctcaagaaaagagagaaaaaatcagctctctctcttcattctgttctatccaagccctcaatggattgaatgatgcccagatgcattgatgagggcaacattctttactcagtattctgattcaaatgccaatctgtcccaaaaacactctcacagacacacacagaaataatgttttaccagcaaattgggtatccttaacccaatgatattgacatataaaattaaccatcacagtcagtaactacagcttccctaatttttgcccccaattctaactcaggaccagccagagaaagccaaatatactttcaaaccaatcacataggatgccggacttctaattagcccgtcttcagcttccccatacctgctgattcagcagcctcccatcaggggacacctgaagctttccctttttgccccactgtaaatctttcccactctgcctgcctttgaggcactgccaaacacaaatgattgtaggtgactctttgttatagcaagctctgaatatatagtctctgtttcccatttgggcattcttcattcatttccacccaagtcactgagatttgacatcatttctttcatcagatagcattatttcctggataaatatatatctcaggcccattatgagctcagaggcttggaggacatccttcatccaaagtagaggcccatgaagaataagtcaaagagcatttctcccatggagcctggtcctcaaactttggcatgcatcagaatttcttcaaggtcttctgaaaacacattggatgacacccactcccaattttccctttagcagagctgagttggggaccaagaatttgggtttctaataagttcccaggttgctgatgctgcctgcctgggaccacacttttgagaacgactgactcaacccttgagcaaaacaaaaagcaaacaaacaaaaatatcttacccctgggctatttagtgccgggatcaggttctcactaaagaactgctgtaagtcattgtactgtaaatcacagcctctgtatctgaagggatcccaaaggaaaagagggagtgatggctcagtcttttcttagaggtgtctaaggtgacgtccctagaggtctagaggtgtctagaggtgacgtctctgtcacctctccagactcatgtaaataaaaatgtctgaaggaacaaagggagagagagagatgtaggggccgagaacagacaaagatacatcatgtcaaagagaaagggagccagtagaaagagaaacagatgtaggcatagaaagaagtagaattaaaagaggataagtcagatctcccattacctcggccctgtagaaggaagggcttcctggtagaagggcagctgtctacgctggcaatacattggaatcccctgaaggtctcctaacatgtaccaaggcttggcccctattgccagacactgcttcagttgctctagaatggggccttgactattggtactttaaaaatatccccagatgattttagtgtgtggctgcacttgagaaccaccagaatatagggcagcatacccaaagggcattcatctgttacctctggaaaactactctcagtggacaatagtctattgcgtcctgaaaatacttgggctcacctggccagctcagaggtgaacatactttttcatgcttttgatagtgcatctattaattcatttactcatgtacttgcaaatgaatatttcatatatttcacaaatttataatcccagtaccaccagaagagttgactctcttgacctataagatgtgtgatttcctcccaaatcaaggggattacatctaagaaggaaagttgacatcaacccccaagaattcctgcaatcacaaaaaggagaagaaggtgtgttttctgcactgtttcttgttctgcccacccgtatcctagggtgggaaatgtacagttacactctatagattattataattaagtagtgtgtggaatttgttttaaaaatagcttcatcaactcttcatagcatatttctgtaagacaagtacaggtgaaaagcaagcgagggttgttattgtttagcacatttaattaagtaagtatttctttcatccttctgggaattaaacattgaacagtgaataaacacagggaaatctgcccatattaatttctggcttactgccttaattcaaaagcagggtgaaaatcaagagctaagtctgtgatctggggtcattatgtgctaagcaaagcaattgaaggtttaccctttacatctccgatagaagttatttcaggaaatatcttcttttatgttctcgctctcaactacctccttgatggcctccttctcctttataaataaacatcatctctcctcgttcttgaagaaatttttctttacgtgtcacctgcatcagttgtaatttttgtttaacagggacagaaacacctcaaactggctaactggagagagaatgtcttggtttatgcaaatgaaaagtctagtcttgcaggctgcatgtagagctcaaaaatgtcatcaggggccgggcgcggtggcccacgcctgtaatcccagcactttgggaggccaaggcgaacgtatcacgaggtcaggagattgagatcactctggctaacaccgtctctactaaaaatacaaaaaattagccgggaatggtggcatgcacctgtagttccagctactctggaggctcaggcaggagaatcatttgaacccaggaagcagaggttgcagtgagctgagattgcaccactgctctccagcctgggtgacagagtgagactctgtctcaaaaaaaaaaaaaaaatgtcatcaggaactgcttcctcttctctgtcccttgcctctacttcccttgtcttggctccattttcagataacccttcccctcatggagtcaagagggtcacattggctctgtcctacatcctcctaggttcaagtccagtggaaaatagaaaatactagtttattccaacattcaaaccaaagcttaggtctgactctaatgtcctgataggatcatatggccattaccacattgatgactgtgaccagaagaaagaatgatccaagtttaggccaagtcacatgcttcagccatagtactgggggttgaaccctaccagaagtacctggactagggcggggaaggaggctgtcaagaaggtggatatagtttccacaacaaaaagtggtgagtagttactagaagaagagtgtatggatttgttacagcaaagcacttctgagttttatttaatgaaactgaggctgctttatatccttcccatcttgagtccttctcaactgtgagatttggtagtttctaatccaaactagaagtcagcaaactttttctgtagagtcagataattaattttttaggtcttgtgggccatacattctctgcataattacaactattcaactctgcactttcagtgtgaaataagtcatagataatgtataaatgaatagccatggctgtgttccaataaaactgtattttcagtattggctggtgggttgaatttagcccatgggctatagtttgctaacccctgattgttaatcatgggtcctaagtatgagaaggagtcaaaataatattttaccctcctctcctccagcttaaccataccccacgttctccattctcatcacctttctacaatcagaaacagaaactcccataaaccactgagactgaacattgatcaaattatgggaagtacatattagaagtcagtagatagtcatattaatgccgtatgaaggtacattttccatggtctcaaaactcagattaaaaaaaaaaaaagactgagagacaaaatagacaaatgaacaatggctaagccatatataaaaaatagaactcacctcacaatctgtagcagccagtctaggaggtcaaacaagaacccctgtatttattgactcaaatggtcaggatttgattaataattgatagcttctggaagaggtggagttgtgggggttcaagtaaaaaatattatattcaaaaaaaatttggtatcttctctaatttttgtccccaaacttagggccaactgacgaaagccaaacaagttcccctaaccaatcacatggatgttctgcttccactgaaccaactccagcttccacaggccaaaggcctccaatcagggcacacatgaagccttcccttctttctgctacaaatctttcccactcctctgcttgcctttgaatctataccaaaatgtaagtgatggcagctgactcttttgacatagcctttgcttgttctcatttgggaggcctttgtttatttgcatagtatgttgttattatcctacatctaaactaaagttgtttcaagatgatctctcttaaggtatgaattctgttcctacaaaattcatatgttaaacccctagcaagacagagcagggacctcttcttagggacttctcttagggtccccccaaaacatagaaatagaggaaaattgtgagctccttcaagggaaattccaggcacctagctagccttaaaaagcaagaaagtggctggatgccgtagctcacacctgtaatcccagcactttgggatgccaaggcgggcggatcacaaggtcaggagatcaagaccatcctggctaacatggtgaaaccccatctctagtaaaaatacaaaaaaattagctgggcgtggtggcacgtgcctgtagtcccagctactcaggaggctgaggcaggagaatgacgtgaactcgggaggtggagcttgcagtgagccgagatcgtgccattacactccagcctgggcaacagagcgagactctgtctcaaaaaaaaaaagaaagcaagaaggtaacagtagtgtgaaacaacagccaaagaagttagagccacaagatatttgattctctagagaaactaaagataacatcttcacgtttgttcctgagttgtttttcaaaacccagatgctcaccagatgaaaaatactgtccatccatggcacatagacctcagataagaaggaactaaagactgaattctgaccactgttctttgttctaaatttcttcctgagggccctaaataaagtcatgctcacaggcaaagccttaacattccttactgctgaccccaagtttttagacaaagtcttatttccttaaccaactgcaaatcaaagaacctctgaatccacctgtgacctgtaagcccccacttcaaaatatctcacctatttggactaagccaatgtatagtccccatgcattgatttacgactttgtctgtaacctctgcctccctgactttaaaaactcttacatgtaagccatctatgagtttgggtcttaagcataagccgcctggttctgcttgcttggcaccccgcaataaatgcctcactcttctcacattgcaaatcttgatgtcagagtttgactttgctacttcaggcaggcggatccaagttcagtttggtaacactaactcctagtacatgaattatgattatattatagagactgttgtgggaatcaggaaaccagagagtccatatgggtggaacaggaggattttatttaggtgaccaccggctcagcagattaatatccaaaggctgagccatgaatgaagacagggcttgactttcatccatgcaaccgaagtgggatggcttgccagtggcacaaaacttgtggggcagggaaagtgagcttacagaagcagaacaaggcagttaatcaaactgtgacaggttcctaactcaggcttacatgtgactcttgctatgcaggccaggtggctattatctaggtttgctcaagatgcctgcacagccttatcttgtgtccttcgctatggtacccagatggctgcaatctaagcacgctcaaacatgtctcatgacctccatggtgctacagagacttacagactgtagttacagaaaacaggaaaccataaactcataaaaacttgcacagcagggtccaatcacacagaatggggagggattcgagggggaagctgctcataccaaaggaaagagggaaaatttgtttttcctctcacatctcctgcttcaagacagagcctttaaagaggtgattaagttaaaacaaaggcttttgggtgggtcttaatccaacctgactgttgtccttcaagaggaagaaatttgaacacatagagagacaccagtaatgcatggcacataagaaaggccatgtgaggacgcagcaagaaagtagtcatctgcaagccaaggagacaggcctcagaagaaactaagccccatgatacctcaatcatgaacttctaggctccagaacatgagaatataaatttctgttgtctaagccacccatctgtgatattttgtcatggcagccctagcaaaataatataatctcctatgctaaattgtctgttaccaatccaacaccaccatccctcccttctaaggcagggaggtacattcagggtctcccttactgcaaggctcccttcttatgctagagcttgccatagagtagaattcacatgagatgttaaagggggagataaaaaggacgctgttattcacgggtaggagtgcaagacttcacaaataaaaatacaggatacctggttaaacttgaatttcagattggtataaggatgtcccattttgccatgcatttttatgtgcaatatttggacatacttacactaaatatttactcattacttacctaaaattcaaatttaagggatatactggtaatttatcctagaggatatggtggccagtcttggtgcctttgcagaccacctccaagaacttcccctctgtggttctggcaggcttatgcttttgaagatctgtccagggtctcatgctttgaggttctgacatatggatgctttggtttctcacacttttccgtgaacttggactgttctactcacttcactgtggcaaagctgatgttcagctatagccttcctgaccttcacttcccagttcttgacatagttgtgtaagctctaatttctatattaagcctcttattggtataacacttggagtggctctaacccaacccagactgatccacccttttatccacagtcttgccaattcaggtcaattcaatcacttctgatgtctctgtattagtccattttcacactgctgataaagacatacctgtgactgggtaatttataaagaaaaaacactttaatggactcacagttccacgtggttggggaggcctcacaatcatggtggaaggcaaaaggcacatcttacatggttgcagggaagagagaatgagaaccaagtgaaaggggtttccccttataaaaccatcagatctcgtgaggcttactcagtatgggggaaattgcccccatgattcaattatctcccactgggtccctcccacaacacatgggaattatggaagctacaattcaagatgaggttaaggtggagacacagccaaaccatatcagtctccatactctatttaggattctttccttttactctctcctctggaaggttgtgagtacctggagggcttatatatcttccaccaatcagtgtaaccgccagaggggttcttcctgcctactgcacaaataaagacctcagcattgcagtaaagaaagagtttaatagacacaagtccagccacactacatggaagatggaattagtactcaaatcattctcatccaaagctggtaggtcaggggttttcaaaggcagtttgggggaaggggtggagatgactaggcttactgatgattggttggggcagagatgaaatcttacggggttggaactgtccttttgtgtgttcaatcacttcagggtgtgggccactggaggagtagggttggcacgtccaggtggagtcatatctcaaaaggccaatctactatagtagtgttatctgcaggaatggctggcaatctatgtccccaacttagcagaatcaagctcctgtcttcctccagcctgatgttctttcattagctttacaaaggctgttgagttttggggaagtcctattataatttaaaccatagcctaaatgtcttccaaagttagctgggcccaaaagcccaagtgaaaggcaagatgaggggtgggttaactcacctcactgttacaactttctcactgatataatttttgcaaagatggtttcatcaggagaaggacacccagtctacacctgtctttgtcgtcgctgcgatataaaccatcttgtatcgtccttgtaaccatgcactgtcacccattaaggcctctaggtaatacctgtactatgttcttcacagcctgacccctagctagccctctaagcattttggttttcctcctcctaatcataccacacatgtagaaactgtcagctcctgtacctggacaatgctagggcaggggagcattgaaaggctgcctcctggtccctgttgtcaaatcctgccctctgtcactgctacactaacacaagggccaggttggataaaggcttctccacttgtgcactgtttcctacagcttaccagagaagcaaggctcaagtgttcccttctcttggacactcagaatttctgtagtagctgtcatctcatctcattccctggacctacctgaaagggtcaagaattctgcagccatatccatagtgtcttctgctcctctactccacttccctagtctctctccccaatcccagaaagagtccttatctcttttttgtaaggaaatctgcttatcatattgctatgcgttcttatctatccatggtttagcaaatacgctctaacctctcagtctttcagattatgccttatatattcaaagccaagctcttagaattacaacaaataatacaacataaatctgttctccctgtaagctcacctattacaatacaagaaaaaaaacagcatagctttcatagttattgtctctgctatgtgtttaaaaactattcagaatcgatgagctgttttaggctgtattcacactcccctgagggattaaatgttaactcactgtgtggagagccgcaggacagcatcagaacatataggaacgaaaaatctcaattaatatctcaaattgtatcccctacttggaattgttagcacactttatcagtttacctctccagaaaatcagacaagaaagtgcatatggaaaataagtcataatccaagattccatagaacaatctttcctgctgtgaagaaacagttcgttatgagaactgaatgggcttttataatttcaggcaaagatcaattacatggggctttagttttatcctaaaacatttttctgaatcataaaaattaaaagggagatattaaaaaatcccctaaatgatcatgtagtttcaacatgttacctacaaaagaataaaatgaagctggcttctgacttctcttcaacagtaaattcctggctgggcacaatggctcacgcctgtaatcccagtactttgagagactgaggcaggtggatcacttgagccaggagttcgagaccaggctggccaatatggtgaaaagccatccctacaaaaaaatgcaaaaataagccaagcatggtggtgtgtgcctgtaattccagctactcgggaggctgaggcacaagaagagaatcacttgagtccaggaggtggaggttgcttccacacgttgaatcaggaatcagctgagtttaatagaaccagtaagtaacataaagactgaatagtgccaattggattttatgaaaaagaagtcaccagtaacagacttaatcaatttttaggatatctgatatgtaattttataaatataatgagttattagcatttaaatgaacatctatacattgattctcagtaactgaaatgaatttccccacagcattcagagtacatgaaatggcacgtttgtttgttttattttattctgagttatattatatattcacatgacacaggagttacgaagaaattacttaggcagaattgtatgggagtcctcggtaaggcttttctttttaatgaacagcagccccaagtcattttctaacaaagagcagcctgtaaagtccagctgcagacatacacaagcaagctggaagcttgcacaggtgaatgccaacaggaactagggactagacatgttcaagatggcggctccatcttcccttctctgccagccacatgtacagtaatgaacagacaagatggcaccaatcaactaaaaagtccatttgcataataagattagagtaggacaaccagccttccgcttgcactatataaacattatacctgatagaaccaatctgtgtgccctatgtaaatcagacaccgccttctcaaacctgactataaaatctggtgcattgaccaccagctggtcctttttgcttggagacccccctctctctacagagaaagctgtttctctttcccttctcttctgcctactaaacctctgctcctgactcctcctgtgtgtccatctcctaaattttcatggcgtgtaatgacaaaccccagggtctataccccagacaacatagatgcttcataagtacaatatgtatgtacagtttaagaggaatgacaaaatgaaaactcacaagccaagttaggaaataaaaccttatcaggaacttaaaagggccctgtgttccctttactcatcccatgcttctttagttcccccaaggagtgatcaaaatctgaattttgtgataatcattcctttacttttcattagattactacatatgtgtgtgcctcttacaacatattgtctagtttaaaacttctaacaaatgtaacactaaattattctgtaactttcctatttttattcaacattatgcttttaggatttacccatgttgatgcatgtgactactgtctatttatttttactgctgtagagtattatacgtcatgaatagtatataacacaatttactcatccattctactattgatggacacttggtttgcttcccattattttgcagttgctacaatgcaaccattgatgttcttatgcatgtctcctggatggagtcacaggcagcatacactgtccttctattcttggatcccatagagatccctatttgtgtctgatgttcacattaatagtatccaagatagctgaaaggaggttattctaataattcatgcacattatttgaattagaacttcatcattattttgaaatatttgatatgaaaagattgggttagattcagtatctattagcagcataaaagattttcaatgtaacatttgtcaaggaagaaaagaaagagctgttagattctgtaaatataatgtcaactgctaatttatgaatggttttgaaaggctttaactttcatattacttgcttgtgggaacaaatttctcatcacgagcgactatccagaatttaaagagatcatgaccaaaagtctcaaacaggaattgtgcatagtcatttaaaacaaaaaatatgattactacaaatattacgctcatgggactgagttcaagtttccaatttaaaaaatggaaattattttagctgaacatcttatgcaaattcattctttcccttactttttgtggtagcctgcctccaagatggtacccagtgattcttgtctcctggtattcacatcctcatgtaattccctctcatattgaatagggaagacttctgtaactaataagataattgcagaaatgacagtgtgtgatttccaaggctagtcataagagacactgtaggcttctgccttgctctctcttagatcacttcttccgggggaagacagtcacagcattacaaagacactcagatacccaatgggggctccacatgctaagaagttgaagtctactgccaagagccagcactaaccaactagccatgtgagtaagccatcttggaagtgtctcctccagccccagtcaagccttcagatgatgtagcccctgatgacatcttgcctgcaacatcatgagaaaccttgtgcaataactacgagctaagcagctcctaaattcctgacccccccataaactgtgtgagataaatgtctattgctattttaagctgataagtttgggggtaatttgttatacagtgatagataactaatatattttggggatatttttgtcataattatacaatattttaaaatgtcagttgttttcaataatcccatatcaatgcctcccaccaatcaccttctaaaatgcagataaggtatctttttggagagaaaattaaaaactgggattgctaatattcaggagccttcaccttacacagaaatctttaagtcatattcacagactcctttgttcctatttttatgtatgttggggcaaggggacataggagattaacggcataatagagccacagtgcggtggcagaaattttatttcaagggtttactgaaagttaatggtcctgaagtcactctgtatacgaaacatgagcatagttgacacatttgaagtccctaagcactaaaacaataacgatgccttcctatgtgcaaagataaacaaaaaacgatatgtgtaagaagcccctgacattactatttttccctgatgcttcttcttgaaatgtcagttaccaaattcatcctaaagattgttttagtttcccactttttccctttcctcatagttggttgattattgtttaatccagcaatgatgaaacaccctttacaaacataaagattcatttctaacatgaacattttttattacagcaactcctttgctccagttattatgaaatcaatcattttacttcccaaccactggtgttttcccgaggggctcttgttagccaagctaccattgataagtgcttattctgttaatattcctttgaaacccattataaacattccttttacccagaaactcagcagtccctgggaggtgactaaagggaggatggcagggcagaggggagctcattcagtcctgcagacctcatgctgcccaagttgtttgtccattttttcagcacccatgcactgtcaccttacatgcatgcaaagggccaagctgtttatcctgaccatggagaaggactaagcaggtaacaaatgctaatttctgaggtcaggcaaggcactttatattatccctttttgaagccaatatccaggtatagggcaggatgggaaggttctgagcatcctgcatatttacaagtactttgctacatttagtaagaactgattagtggtcatacccatggaagtcaaaaactctagcatggtggctcatccttataatcccagcactttgggaggctgaggcagaaggatcagttgagtccaggacttcaagaccagtttggacaacacagcgagacctcatctctacaaaaaatttttaaaattagctggatgtggtggcgcctgtattcccagctcctagggaatctgagaccagaggatcagttgagcccagggatttgaggctgcggtgaactatgatccggccactgcactccagtctgggcaacagagtaagactctgtctcaaaaacaagcctcttacagtttggttacatttttagaagattaagcacatgccttaaaaaacatgggcaaagaaaggcacggaagaaaacttaaaaaaacttgatattaaaattttgaagctgagctgttcgatataactacagtcacatgtgactatttaattttaagtgaaaattaagtaaaattaaaaatttcctcagtgggacgagcatatttcacctcctttataggccatgcgtggctagaacagatggaaaacatttccatcatcgcagaaagttctactggacagcactgttctgaagtgtttaatttgccatcatggaaaagaaataaaattcactgaatgtccttaaatctgttttatgatttggcattgtgtttaagtctggattgcacatttaggatagaggtaagaggaccacactattttcagtgtctggagacctctaaagactctaattcgaccttggccaaaacgatccttaacagcatttatatgcttgatctcctctccacgcagcccatcaataagccattgcgctccacggtcacacttcagcactcccaatacaccaggcagacactgagtacgagtctcggctggtgtcctagcaacagcgacgcgaccccgccccttcccgcgtacacctcctaccttattagcctggaaggggcgggaccaggggtccgtgcccaataggaagggagcagaggagtgagtcctggccgcgtccccgtcgctagggaaaccgatgcagctggaggccgcgcgcgatgcggctcgcggaggagcgggccgcgctcgcggcggagaacgcggatggggaacccggcgccgaccgacgactgcgactcctggggacctacgtggccatgagcctgcggccggctgcgggcgcctgggagcgttgcgcggggagtgctgaggcggagcagctgctccaggccttcctgggccgcgatgctgccgaggggccgcggccgctgctggtggtgcggcccgggcccaggggcctggcaatacgccccgggctggaggtgggacctgagtcgggcctggctggcgctaaggcgctttttttccttcgcaccgggcccgagcctccagggcccgacagcttccgcggcgcagtggtctgcggggacctgcccgcggcacctctggagcacctagccgcgctgttctcggaggtgagggtgggttagtgtccccgcgcggctaaagctgggtgggggaggggaggaggagccttaagggacggaggcggggccagagggggcggggcgaagctgcaggggaggtccaagaggcggagtgataggcagaggggcgaggctgtggagggagcacaaccaggagggaagttcctgaagtcaggaagaaaatgggatggggttaggggcggagtcgggtgggtccggagggagggatctgggtggaggccaggccagaatgagaatgggaaggagctgaggcttgggtcagtccgggtctgggttccagccaaagtcaggggaagaccataatctgaagagtgcctaggttctgactactttcaaaatcagcctctcgtaatccctcctgtaaattggaaagatctgaagaagatgggaagtggacaagacggcatttctgatggatcagtggggtggaaggaggtggatggctataaacagtgcctacttctggagagcagttaaatgggagggggaggtgggtagtgatttgcttttgattttcatctcattcattcattaccaaccatttagcaaaggtcagccctgtgccagcataagaagttgggctcccatttggaaatgcccagcaggcctttggaggagtctgcctgaagctcagggaggaaggtggagatgtgggtcatgagtgctttagtggcaccacagcagaagcttcgagaatgcaggagatttcagggaagtgctccagagagattcctgggccccttagacctttctggaatgggagtaaactgccctgcaagtcaggctgtgtgcttatggaggcttgatgccctggaccctgcaggttgtgaaataaggatgggcagaatactggctgtatgatggttcaggtgataggtgctatagggaataccaaagaactattcccacccatgaaatgcttactccaaggagctgaaacgtatgtaataattcatatattcaaaatgtttcaaacttttaagactggggtgagggtaaagcttacctaaaagttggccccactgctggatgcaagtcctggagtctccctgctatgtcaagtgtaagccctttagatggtgtatcaggaggctgtggggaggtgaaaattccagggaaagggttggatagatagaggaggacacagagggcccaggaagctagatctcttagatatggaggtatttcaatattttaacaaacagaatggtcttgcaactgtgcattgtctgaaagccatcccgctgaagcctgaacttagatcagcttctctaatgaatgttgacgatagaaagtacttttggcttcagaggagaaagacaggcctgtgatctgagaagcatgcttaacataagtgttgaattgtctcctgaacaattagaagaatttgtataagtagagagcaaggtaactttcaagatactgagagcagactgatcaaaggttcagagacaggatttaacctagtgtatgtgggagacagaaggcccatctcagagttgtgtcatggccaagcaaagtagtccagcaagaaaaataattttaaaataatgaaaattctcgaatgtttaagaattttcattggtgcattgaaagagattggagacaaacaatgttcatcaacaggggactgggtgactgaattatgggccatctatacagtgaaatactttgcaactattaaaaagaatgactgatatggaatattcctttttttgaggcagggtcttgctatgttgaccaggctggtttcaaactcctagactcaagtgatcctcctgccttggcctcccaaagtgctgggattacaggtgtgagccaccatgtccaaccggagttattccttagggtaattttttccttgtggcaaaaaaaacacatgacgtaaaattcacccaacaatttccaagtgtagagtacaatattgtcaaccacatatgcattattgtgcaacacatcctcagaactgccccgtccagcatcactgaaactccacacacacccagcaagccacacatcgctcccctgagctcctggctagcaccattctactttctgttcctatgaacctgactcatcatataagtggaatcatgcagtatttgttccttctgactgacttatgtcacttagcataatgtcctcaaggttcatccatatcgtcaccgcctatcgtcatatgcgggatttctttctttttttaacaatattctattgtatgtatataccacatttctaaaaaatttatccatcatagacacttaggatgtttctgtctcttggtttttgtgaataatgctgcaatttaagataattttttaaagaagtgcagaattgcatggatggtatgctactatttatgtttaaaaaagaaaggaggggaagaagagagaaaggaaggagggaagggagggtgggagggagagagggagggaggaagagaggacattctttaacagtaatccacaagaaggagaaacagtaactgaagtacaggggtaggtggaagatttacttcccactgtaaaagcttttgtacgtttaaatttttgccccatgtaaatgtattacctattttaaaacctaaataaataacttattttaaaaataactcaagtcctttccttgcatttctcaaagcttgtaccagtaactttattccactttctgtccatccatctacttttattccataccctgaagctgatccagtgtctctttcaaggcttgttggcctcccatctgctaagaccctccttctggcccagccctcctgtccaccccctctcctctctctcagcaccttgtaatcagcttaatagtctctgattacctgctccccttttccttccacctccccatgcagcatcgctaaagccagaagaacctacctggctgagagacgtcttcctgccttgtgtgtgtgtgggcggggcggtttgggggtaggattgagggtgttggctgagagaaagctgtaattttaatattatttttgttccattctacgagtacaaggtaaaaaaggaaaatgtgcctaagaaatgtttgaaaggaagaattaacagaatttagtaacttgttctcctacttccttacttcctcctccaaccacatcattcactactgccaacttatttttcctagctctgaaacttggattttttttttgactttttgcattttggaatgtgagcataagatttggaatctcacagacctaagtcaaattctggttaaattcagcagtgtgatgtgagcagatgtgctcactctgccaggtccaaaactgtcttgcagggttgctatgaaatttagacatcatatattagaacacctggaatagagtgtcacactgcaggtgttccataaaggatgagaattcttgtcactcttcatcctatttaaaatcctcctcacccatctgatggatccttgtcaccttgctgtaacccatcctggctcctcctggaggactcagctgcgtttcccctacagccttctcctaagcctggagctggggcaggtggcctccttgttcctccttgctgctctagatccacatcaaaaagcctccagtttgaatctcctgtcatcaaaggacatcatccactctcactgctgcatcctgtacagatggtgctacccttgcgtgtgtatgattttgcctcccaactcactgtggctctccccaacattacttctaatatgtggttatttccaaagacatgtgaatgacccttccaataacttggcctctgggttctctgtatctttgtcctccagtgatcttgtcctcctcccgatcataagcagcccctcccatggccatttccagaccttgcattcccaacaaccaccaacctcattgtccaattttatgcacctccttctctgaccactactcccatctttccagctcactctctctcataccctgactacaacagtcctttgatcctgctgggagctccaatctcttgaccttggctccttcccattggccctggaccatgcacacggtctcttctcttacccaatttgagtgccatgctccttcatgatcatcatacccttgcatcagctcctgatgtactggcctctacctcactatgtcatactcagttggtgcaaccacaatcctggtaaaacccagctctacatacttcatacctgcacccattaaattaaaagagaccagggaaaaaccaatgggctcctctttaaatacacgacctctcgaactgctaagtaagccttttatgtttcccagcagacattctattttttttctattccaactatattttcttgctcttttagatcactatttcccaacgtgagaaacaatttgaaaagaaaaatctttcttctttcaaatgtccaaaacctcctgttaacctcactctgagacgctcttgcttctttcttggttttttaagaaacggaaacgagaataacaagtccacgaactcttatgtccactttgactgcagcatctctccttgtatcttctgccatcccatccgttgctagaggtaaactgtttgtgctgccctctgatgccaaccctaaggctgaaactgctgcctgtgctctgaatcccacacattcctgaggagatcactctagcaatttcctcttctcccctgcattcatatttttctcctctctgctagataattctcatcaagcaaaatcctcctttcatcccaccagctgtcaccctatgtttatgacccccttcatagcagaattcctggaatgtgtgtctcctcttggtgtctcattattttcctgttttatctcatcatcactcatcaggctttgactttctcacttcacagaagaggaataaaataacgtgtcaatgtttctgatgatctccacttgactaaattgaacggccctgaatcagtcctcgttcggcttgacctgagagcagcgtttgtcatagctcatgatcatcctctcttcctggaaacgctttcttctttgggctccaggaaccagtcttctggtttcctcctatcaccatggctatcaccagtgatggtgcctcctcttattccccacttctttttttttttttgagatgaagtctcgcactgtcacccaggctggagtgcagtggcatgatctccgcttgctgcaacctccgcctcctgggttcaagcaattctcctgcctcagcctcccgagtagctaagattacaggtgcccgccaccatgcccaactaatttttgtgtttttagtagagatggggtttctactctgttggccaggctggtctcaaactcctgacctcgtgatctgcccaccttggcttcacaaagtgttgggattacaggtgtgagccgccgcgcccgtcctcttcccaacttcttaacaccagatggtcctacggctcattccctggacgtcttctcttctctctatatacacccattttcttgggggctgtcattcaatttcaaagttccacaagccatttgtatctgacacctcccaaatttgttatctccagccctctcttctcctctgaactctcaactagcatatccagctgcctactcaacatctctatcttaaagtccaatcgagatactacattttaacatgtgcaaacaaaagctcctgtatcttctctgaagatcttactccacctttactcctccccacatcagttgacagcaactccattcttcccgttgttcaagccacagatcttagagtcatcctgaccctttttttttctcttgcgactcctaaagcaatttgttaacacatcctattggctataccttcaaaatttgtatggaatcaggccatttcttaccatctcccccactacccactgtgccacaccaccgtcttctgtattatagcaccaacttggtaggtggcctccctttccacctttgccccttagagcctataatcacggcagcttggttgatcctactcaaaacgatctcagcctatggcactcctttgctcaaaactttcaatgatgtccatttctctgagagtaaaaatcaaaatctcacaggcaaggctgcatgtgaattgactccctttactctcacctattctttgggatcactctgtccccgctttccttgcttccacactgctccttgatcagaccaagcatgcttccacctcggggcctttgcactggctgttccttctccctgcaatatacttctcccaaggatctgcaaagcactccccctatccttcccagcctttgttcaaatcttatcttctcagtcaggccaacctcaacatttacaattgcagcccctccaccccacactcctgattcccttcacatgctttatctttattcacagaacttactgtttcttgactgtctctcccttagaatataagcttcatgaggtcagaaatttttgactgttttgttcacgggtgtatcctcctagcacctagaaaagtaccagcacataatagatgctcagtaaatactcattgaataaatgaatgagtagctttttggtctgttgttgttgttgttgttgttgttgttgttgttgtttcgagacagggtctcactctgttgcccaggctggagtacagtggcacgatttcagctcactgcagactcgacctccctgggctcaagcgatcctctcacctcagcctccttagtaactgggactacagacatgcgccactacaaccgggcaatttttctatttttttttttgtacagatgaggtcttgctatgttgcccaggcaggtctccgactcctgggctcaaacaatctgccctcctcagcctctcagtgctgggatacaggcgtgagccaccgcacctggctatgagttgcttttcacttcatagagagttcacattcgttatttttctgtcactcaaagcccttaaaacccccactcaaaactattcctttttcttcagacagtgtacattcagttatttgataaacatcttgagtgctttctatatgccagatcctggagagaactctgactatataaaaattaaataagatagagtccctgcctttgagatcctaggaaaattccagttcatcctctttcccggttaggacttctgccctgggttcaaatggttctttcttaacatgaatgtgataaagcttaatttgtaaactttccttcctttttgagctccctttactgattgttgtaagttcccagctcagtgaatgtttccagacagaccaggcaaagaccatcctctagaatctaacatgctgggtccaggtattctatttcacggccactggggcttattgatcataacccagccagtcatatgagttcatatttccttttgattatttatatattggtagcttcctcatcacattatatgagcatctgtttgtctttctggtattctccttccatcacttgtgagattttgacagtcaaagattccgggtgagtttactgacaactttctttcttttcttttcttttcttttcttttttttttttttgagacagagtcttgctctgtctccaggctggaatgcagtggtgcaatctcggctcactgcaacctccgcctcccgggttcaagcgattcccctgcctcagcctcctgaagtagctgggactacaggcacgtgccaccacactcggctaattttttgtattttagtagagacagggtttcaccatgttggccaggatggtcttgatgtcctgatctcgtgatctgcccacctcggtatactgacaagtttctaagttgcgattaatagaaacctaatttaaactagcttggaaagttcaagagcagcttgatttaggagctcaaacaaagttaccaagacttggtctttctccatctgtaagcactctcctctcatattaactttattctaaggcgctattggttgtgaaggtgaccaagaaaagctccacactagcagaaaagagaaggtgtctcttccttgaaaagtcacataagacactttggcctgactctcactggctcagatttggttccatgttcacctatggatttggggatgaatactgaaaaaagaggaactatgttgggtggccagaataacctaacgttcaccctaaagatggattcaagatcctcaactttgcttgccttttcaaggtgcccttcccaccacctgtagacagaaggtcatgtttatctgcttgtgtcctccttttttgcctctggcctttgtgactatttaatcacctcctattcaccccgttgatgagggagggattcctgcctgagagtgatggagatgggtaaacatacaacacccaacataggacagacaccattgacagcagtttttcagtcaacatactcacagcccagaagaggacactgagccatgcaggccacatggggattgctcttgggaacagactaaatgacaaggggctgtggaaagcacactttgtattaatagtatcaagaaggtgtagtggtccctggatctcactgggggacgcaattggctagtttaaatcattccaccagctggcagggaactgaagtctgcttctcagggataagcgggaactgtgcctcgtcctcttgataaagagttttttgttttttctttttacattttttctgagatggagtcttactctgtcgcccaggctggagtgcagtggtgtgatctcgactcactgcaacctccgcctcctgggttgaagcgattctcctgcctcaacctcccgagtagctgtgatcacaggaacccgccaccacacccggctaatttttgtatttttagtagagatgggtttttgccatgttggccaggctggtctcgaactcccgacctcaggtgatccacctgcctcagcctcccaaagtgctaggattacaggcatgaaccaccgcacttagccgataaagaattttttggctagagggctttatccccaggagcagaatgggaaggaaaacttgtaagcaggctattcaagggcttccccaatttaccagatgtcaaggtcgtatgtaatgttcgaccctattattaggccttccagcacagtgacctgcaaaaggttgtatatagctttataagccttttccagatgaggatttctttaagttctcagaattggaacacctgcctttctttcctgtgcacctctgttccaggttgttctacccgtcctggccaatgagaagaatcgcctaaactggccccacatgatatgtgaggatgtcaggcggcacgcccacagcctccaatgtgacctctcagttatacttgagcaagtgaagggaaaaactttgctgcctcttccagcaggctcagaaaaaatggagtttgcggattccaaaagtgagacagtgtaagtaccgccagcctggccatatgggcctctgagatatgggagatgctggttatcagaatgttttccttacaacttttctgttcctgactctgcacatctcctcgttctgcacacaagcctactgtctgctctgtttgccgacaccctcagactgtggactgtgtgtttaccctggttactccctggcccagccactgcatgaagtcttccaaggctattacagcaatatggcctttttttcctttcagaatcatttcagggctgagcgcaaccacactagctttccgtattttgcttatcaggatagtgtctcatcattggcaaagacccaggtccagtctgggaggcaggcatgcctcttcccagtgtttactcagtacataatgtcacagaactatcgctgccggctcttgttacagttccagactctcctcccccagcagctgaagactttttacaggtcctggggatttttttctcttttcaaatagtagcaaatctggctttgttgggacctggctttgttgggagttcatgcctcctgcccctgagtaggccttaaaaccccaggcttgtctccttttagaagttgaatccaccgtcagcttctgtttaccatgctgactttcgagttttctttgtttctatcccttgggaattcttttcccctttcaagccaggctatgcatataaatattaatagtatattttgctatatttcatccagcatctctatgtgcttgtggcaacggacagccttcctacatgagctcggtctgccacactgtcaggagtttcccaatgtattactgtcaacattgtgtattcaggatccatgatttgatccgaagaataagtaacgcatgcaacagattatatgcgtgcaatgcattataaaatacaacaatgtactttataatgagttttttctatcagaagtaatttcctacatatacaatttgaagtaatttcccagttaattggaaaacttattgcggtttaataaagatatccaatcttcaaaataaataaattcaaactaccccttttctagtccctttatattttaactttgtaacattcagtgtgtgtttctaatcattgctgaatttatctctgtttgttcaagtttgataatttcccaaaagactggatcattttgggggaatgggtgtcttcttcctttaatatcttccacaatcacttgtgccgtatcatttctcagcaaatataaatttaatttaatgaagtggaagtgggtttctgacataaaaatgtgaattgtatgtcctctttctttgtcgttgtgtccttgattctttgcacctatcattttcagttaagactgtgaaaataatgaccaaaatgtattaaaaaaattttaactgcttccaaatatagctaagttactttctttaaaagttgtatgaggggaaaagtttgggaattctattcttcactggaacaatgaggaccaagtgaaatcgtgatggtgatcttcaggtggctgattattagccttgtgaaggaggaaataaactatttcctcttgctgcacaggtcagagctaagaccaagatgaggaaatcacagggagttagaaatggttcagtatagagacaaactttttccttgggagagccaacctattgagaaaggtgctgctttgtgaagtcgagagcttgctgtcactggtaggattcaagcaagcattgggtggtcatctgaatattttctgtccacggtattcctgcattggcaggacaacgtactggcattcaaagttcttaaactagtcttcaggatattgatgagccctgaatctgtatgaaaaatgtacatacacacacataagcattttttttttctggagagaggatctataattttcgttgactagtcaacagagactgttatccaaaaaagttaagaatgcatgggctagatgaaatttctcacctatttttttaaatttgggattctgtcttggggtacacccagggttattttcacgcctcagggtttttgtttttgttgttatcattgttgttgttttgtctttcacagcttggattctatagataagtcagtcatctatgccattgagtctgcagtgatcaaatggagctaccaagtccaggtggtactcaagagagagtcttcccagccactcttacaaggggagaatcccacccctaaggtggagttggagttctggaagagcaggtaggcaagaaggcacatgctggaagtctggggtgaagatgtcttacagagactaaagctagagctttcctgggttaagccaccattgagcctattcttccctataggtatttcacatcatcagtggggtagacagctctgtgtcattgggtcaagagagttttttgatagactgggagatgcacactttccccaagattcaataatcatttttcctttcctgggttcacatcagtatgtcctcttacattttttcaaaggctctttggactatatgtaaaattaatcaactctttaacatttttattctaacttatctgctcccttctccttgagcagctgaggccacatgcacacaccttttgtaaagttctgaatacagaggagttttggggagttggctgcagaacagcctttcctgtgttccggctcatcactcgcagggctggaaagttcatcttccagggtgtttgtccagaaaggcttcattattgctcctgctcctgctcctgctcctgcttatttgccctcctcctccccatttcctcactccaatttattatcgtgctgataaatcctttactcaaaaggaggcagacagatgttagcggcagacgtgcctgtcctggcatggaatggagattatcggtgtcacatgaccagacatgcctgtagggctccagccttttgtctgtaccaccctgctgagatgccccatgctcttgcctggcttctgaccattctgctgacctactgcaaggcccttctcttagcacccttgctccaataacgcctctctcaccctgactcaaccttactgccagagctaatgacctccagctgccaagctttttgagccaccagatggtcacagcagtgtttcctggagctgcccctttgaacctgtgttcccagctcaggcttttgccctcactgggctgggaacagatgtccaggctctttgggctggagcacagcctctgtggaagcaccccgaggcagggctcctctctttctgtgtgacgatgggtcatcacagtgtgacttgcatttcctgatgcttccctggattcacccttcttcatgatattgcaggtatgaagatctgaaatacatctataatcaactgagaacaataacggtgaggggcatggccaagctcctggacaagcttcagagtagctactttccagctttcaaagccatgtacagagatgttgttgcaggtgaggaccagcaagtgttttcacaaatgtgtttgactcaagttaccgtcgaatgatgcattcacctctctctgtctgaattccgcaacttcaagtccttgtaaatttccgacccgacacaaactagcatggtggcaagaataccacatctagatacatgagagcagctaaacagagctatgctgtttgcagttccactgctgtatggcctgggaaaattcacctagcccctctgagctttagtacgtgtgttggttatggggcatacacttctgcctacttttctaggtccgtgtgagattatacaggtggaagaacttattgacttaacacaacaatgttcctggagctgtccctttgtgtctttcaaacactggggccaggacatacagttctggggtggccattatggagcctgtgtgaccaactccagggtggtcatgtgagtccatctgtcctaatcaaggactacccttctggcaagacagcctaaccatgccttccaggacctgggattattggctgggacccctcattaactaagtgcttgtacctccctggcacgctgggaactcctgggtctggtcaaaggtctttctgggcctgtcttcagggtctggaaactactagaagaaagttcttccatccgatctgcctacagctgctgctttgcactgtacaaatccatgttgttacctctcacctctggaattcaggtccctccacctttggctccttgagaaatctctattccatttctagctccattctgcattttctattcctactgtcagatgggactgcaatttcctggccatttgagcaccagacaagatctacgcttatcaaaattgccaagccagcaaagtctatgattagaagtaggtaaatttttttaggactccctctccatttcttggagcactgtgcgtcttctccctttttcttgtaaaatctcctctttgctcttcagtaccataggtcaaaatgtgcttttaaaggtctttgtcatttcacatggtctaagcttaattaaagcagtgattttcaaacattttactttgcccagaactctttctttaaatacaatctcccatgtaagcccactacataaaacgaatccaggcatgtttggtttagtaaaaagggcagtgtcctgtgcccagagcccattggctacttccctgtcccaccttcccctctcatggcatggagtttgcaaacatcttagctaaaggaagaaaagtccaggtgttagtttccaacatgaactacatcagagagcagaactggcataagttgttagtctctgaggtcctccctgaccctgaatcctcattgcagaggcagctctcccagcacgtttggctggcttgggaccaagtgtctcttgaggctccagcttactgctttgctgagagattctgtgttcccgaggaatcagcttttgttcccagtttacacttccaggagacaggtgtccccagaagtggtatgtgtatccctactgatgtcagaaatgactaggggaaagttttttaaaaaaaatatgttaaaggggcttggcacagtggctcacacctgtgatcccagcactttgggaggccgaggcggacagatcacgaggtcaggagattgagacaatcctggctaacacgttgaaacctcatctctactaaaaatacaaaaaattagccgggcgtagtcccagctaattgggaggctgaggcagaagaatcacttgaacctgggaggcagaggttgcagtgagtcgagatcgcgtcaccgcactccagcctagtgacagaccgagactccgtctaaaatttaaaaaataaaataaaattgtttgagggtaatagccctggtttttgcaagtgataccagctttccatttatggtagtgatttacagttttcatgttgtctaatttagttgggttaaattgggagtcaatgtagagaaaaatatgaagtaagcaatagagtgctacagattatacatatgtagaacacatacaaaggacatatgtgaatgcctgaaatttggggctctgaaaaagatgtagtaaaaatatattatgagtttgttatttagtgccccaaatatacttttcacattagtagatcaatagactataattattcatatgaattaatagttataagattcacttccccaggtgagcttcaaaaagttatttgcagtagagtatatgccggcaatgaattttttttaaaaaagataccattacaatagtgccagataaacactaccataaaaagagaaattctttaaatatgaaactcagtgtcaatgatggaagaaaatttgattagaagagttaggtagagacttggtcagaaaatttggcaggatcttctaagctggtgactgattttctcatttctagctgaatttcagagcatctttttttttatcctaaatagatacactatgtgcattattcttattaggcatggtcagggtcgtttattgacctactgatgaattggaaagaaggagaggaaaagaaatatttctggattggtggatatgaattagaaaacagtgagaagaaaaaaggaggttaaaaggatggaggaaaatatgcaggaacccgattgtatgaagtagtattgactgagcagtaaataatcttggaaaacaggaaagcaacagtccccttgagaaggaagaacaagggcaataaagactaattagagagttttctttatttgcacaggataggcatggtacaacctggttgccaagtttctgagtccatttgtgctgctttaacagaataccacagcctgggtaatttataaagagcagaaatttatttctcatagttcttgaggctgagaagttcgagatcaaggcactggcaggttgggtgtccggtgagggcctggcctctgcttccaagatggcgccttgttgctgcatcctccagaggagaggaactctgtgtccttacctgatagacggtggaaggcaagccagccaaactctatgtgaagcctctttgatgagggccttaatcccattcatgagggagaagctctcatggcctagtggcctcttaaaggcaccaactcttaacaccatcacattggccattaaatttcaacacctgaattttggaggggacacattcacatagcagcaattaaggatgtgtgtaggtagatacgtgtgtgaaagaaggcacacaaagaagggctgtctggagccagtgcacactggtttgctgtggctcgtgaagggctgctatatgcattgttttaaaccttgcacccccattctcccaagcagcactcagcgaagtcaaattggtagcctagaaatggacatggtaggaatactgggaatatttataccatagaaattggcagatgctacaaataaacgtgtttgtcctcaaagagcctgttgttaaagactttcctgcaaaccactggagatcactatgcactttgctgtttgtatttacattctttaaaaaggtatgagctcggctgggcacagtggctcacacctgcaatcccagcactttgggaggctgaggcgggcagatcacttgaggtcaggagtttgagaccagcctggccaacatggtgaaaccccaactctactcaaaatacaaaaattagccagacatggtggtgcatgtctgtaatcccagctactagggaggctgaggcaggagaatagactaaaccaaggaggcagaggttgcagtgagccaagactgcaccactgcactccagcctgggtgacagagtgagactccatccccaccccaaaagaaaaaaaaaaggtatgagcccagctctctctctctctctcttcatatgccttgtcatccaagggtattgcatcctgggttggatggccaacccttttctcaagtattgtgctcttaaaaatcaaggcaatgctaattagtataattaaaagagattgtgatttttaaaaagatttcaaaacagggtatcataaagagaaagctcctatagcatgatagtctcagcctcttttctctcagcacttacggaagcaagagcatgcgctcattagaatgactgttggattctgaaatcccccaccccaacacagaggttctaatactcaccatcagcccctccacttgagaatccctgccctaatcaatttactgtgacatctgactttgcaaaaaattcgattcacatactgctttccacaaccttatttgggatataaagtacaaacatacatatcaacatatttttgtgtatggtgagcctccgtgaagccaagggttcaatgtaataaactctgggtcgtcttccttttccttagctggacaggattggttgtttcatgggagggccctaggaaagttattcagaccttaatttcttcacttataaaatactaaagtatgaagtactaaagctggtttgcagggctttctgtgagatggtaaatatctcatagatagtaagtagaacaattcccggcatattgaaactgcttcctaaatagtgtatattttgagttccctttaggatgaatgcagagcttcatccgcatactgtaacctaagaccacctgctctcatatgataccacctgattatctgcccaggacagaaccagcctttgtaaactcgcccttccaatttagtttgtccaatgcccttttgcattccctctaagttgctacgcagatattagcatccagtgctgctggatttcctagtttcccgtgtcagtcaccacaagacgactggttaaaggcccctttctttccttggttgtattcagaggagatggtaagagattttcctggctttgaaaaccagcagaaccttgccataacccatctatgttatgtctctatgctctgtgacttttttaaaaaaattatactttaagttctagggtacatgtgcacaacgtacagctttgtttcatatgtatacatgtgctcactcataggtgggaattgaacaatgggtacacttggacacagggtggggaacatcacacatctgtgacttctttataagtgctcagcaagattctttattagtgaatattcatcagagccaccaccatttatcaaacacctgcattggtccaagcactgtgctagttgtttataaagattcctattgaactaccttcagccttcacaaggaccctttaaactgattacagctctgcctatttttgaggctcagagaggttacacgtgcccaaagtcatacaattgccaagcgtctcggccagcatttgaaggaaagtctttctgattctaaaacttgtattgtctcagagatagcagcaaagtaattggcaaatatttactacccaccaagcaccagatggaggctgggagggccagggaaaagtccatttagaggaatgttacaagacagaactcttcagatcattatcctagttgttcagggctctccagtttccatatttcctcataagagctaggaagttttctggaaccagccttctctctgcttgttgttttgcaggtcttttacttcccagggactagggctccaccaggtgggtattaggctccagatgggaatgctgaccatctccaattccttccagctctagcagaggcacaggacatccatgtgcacctgataccgctccagcgccacctggaagctctggagaatgcagaatttccggaggtgaagccccagctgcggcccctgctccacgtggtctgtctgatttgggccacatgcaagtcctaccgctccccgggaaggctgactgtgctgctccaggagatttgcaaccttctcatccagcaggtgggctgccctgggatgcccagcaactgctccctgggggctggttggcatctagtcacaggagagaagagacaagtgtccttttttctgggcgaggaaataattatgttccaaagagttcttacacttgaattacagtattttactctcagaagccaataatttacaaagacattttcagtaatattagaacacctgagccatcctgtcttcctttcccctctgcctaagaggggataagtaggggtggtgaatttcaacctccttaatgacctatgaagaaggactggtaatgagtcagcagcaaagcctaagcagtaaagagtgcagcctctgatgtcaggtagagtcaggcgatgctgtaccaatccctggctttgccacttggcagccagcataccacttctgtgccaggacaaatcacttcctgttctgtgcctcactctcctcctctgtacaatggtgaaaacaagaagccatatctctttttgggttgctgggtgatttgaggcttccatgtgataatgcatgtgccctgcacatggtaagaacctggtacccataagctattgagaagcagcttcttagattatgcacttcatgctcctccttcttagggacccttgtagcaccaaccagggcagcataaaccttgaggagtgtatcttaagaaagaactagagggccgggcgcggtggctcacgcctgtaatcccagcattttgggaggctgaggcgggcagatcacgaggtcaagagatcgagaccatcctggccaacatggtgaaaccccatctctactaaaaatacaaaaattagctgggcgtggtggtgcacgcctgtagtcccagctacttgggaggctgaggcaggagaatcgcttgaacccgggaggcagaagttgcagtgagcgaagattgtgccactgcactccagcttggcgacagagcgagactccatctcaaaaaaaaaaaaaagaactagagggcttaaggaggtttgggtgatctctccaaaccagtttccttttcttctaaggagctgttctctgagaaaataacgaacaagcttaataagtaactaagaataactaacattttgcaggctgcaaaatactgttacattcatgatttctatcaatcatcaaataaaccctgcaaggtgggcagggaaggtcttattatttattatattatttaaagatgtgggctactgttcaaggaggttaactgacttgcccaaagacacccaaaccaggaccccaacccaggctgtttgactcctcctaggctagtgcctttccattactccatgtttatcagccagaactcttttggttgaaagtgtaagaaaaccgaaaccaaaagtaggagcaaaaaaagaaaacatattggctcatgtaccttgaaagtccaaggtaaggctggcttcagccccgacttgcaatgtggccttagatgatgtcagccagacccagggacccaccctgttgtggtgaaggtggctgtcgctacagctccagcttttcagttttccaggtgtaagcctcttcgagacagaaaaataattatggtccaaataattcttgcattcaaattactttactactgaaagccaataagtcacaaaagaatacctgggaaagggcacctgctccagccccagctagccaacaaagtctcattgtgtttccttgtccctggctacttgcccattcctgagccaatcactgtagcttcagtgactaagactatttggccgaaacccaggtcgcagtccacatgtggaatggaaagcgaggtcagatgtttcctctattatcctcgtgaaaaatattactggggcaatgattcagttcagagttggtgttgcaaagttacaggatgtctgcacctgctcagtgatactaatctgtttgtataccaggcctctaattatctcagcccagaagacctgctgagaagtgaggtagaagaaagtcagagaaaactgcaagtggtctcagacactttgagcttcttcaagcaagagtttcaggacagaagggagaatctccacacttacttcaaagagaaccaggaagtcaaggaatgggatttccagtcttctttggtctttgtgcgattggatggcttcctgggacaactgcacgtggtggaggtgagtgcgcacctcacctcaggctgccagccccagacagaaagaagcagtccaggggtccaaaaagtggaataggaaaatgcacaacacaacctcatagccaaccctccatcagctggaataatccataataaaggttcaattggccagtcacagtggctcatgcctgtaatcccactagcactttgggaggcaaaggtgggtggattgcttgagcccaggagtttaaaaccagccgggccaacatggcaaaacgccttctctacaaaaaatacaacaacaacaaaatagccaggtgtggtgtgcacctgtagtcccagctactcgggaggctgaggtgggaggatggcttgagcataggaggcagaggttgcagtgagtcgaaattgtgccactgcactctagcctaggcaacaggagccagaccttgtctcaaaaaaacaaacaagggccaggcatgcggtggctcatgcctgtaatcccagcatttggggaggccaaggcaggtggatcatgaggtcaggagttcgagaccagtctggtcaacatggcgaaatcctgtctctactaaaaatacaaaaattagccaggtgtggtggcacacgcctgtaatcccagctactcgggaggccgaggcagagaatttcttgaactcggaaggcagaggtttcagtgagccacgatcacaccattgcactccagcatgggtgacagaacgagactctgtctcaaaaaaaaaaaaaaaaaagaagttttaataaatagttgtcatttggattgaccatcacatcacataatagtggttatagtagaagtttaggaaatcctgatcatagacccatttaggaagaaggcccaaggaatcaatgaactagttcaattggtttgcagattgcccatagcctttgaactgggtttcaaataaactctgcctagaaagactgacactgagcaaaccttggctgggctataaccattcccgcaaagctggctgctttgaacttctcctcctccactccccaatctccaaggcagctccccaaagtccaaaacgaatgagtccctgtgcaaaagaaacatgacttttgctcaaagttatgtctttccctcaattatttaaaaataaatatggattttaggtgaagtactacggtgagaagacatgatactatttctttggattgtttcaattctcaaaacttaatatgtttaacaggtctctcaacattttacagctatgtgtttgctgattggacttggaagggagggtaatgggcctaataaaatgaaatacagacttaaacggatttgagaaattcagggttgagtttaagattaagacaagaggccgggcacggtggctctcccctgtaatcccagccctttgggaggctgaggcaggcgaatcacaagttcaggagttcatgatcagcctggccaacatggtgaaatcccgcctctactaaaaagacaaaaattagccgggtgtggtggcgggcgcctgtagtcccagctactcgggaggctgaggcaggagaatcgtttgaactcgggaggtagaggttgcagtgagccaagatcgcgccattgcactccagcctgggagacagggcgagactccatctcaaaaaaaaaaaaaaaaaaaaagacaagagccagagggacagggaaggaacaagaatcatattcccagctgtcatgagcaggtttggaggaaagagagctatgctgggaggaagccatgatgaacagagcaaaccatgggaggacaaggacaggagaacgtaagattggatctgttatcagttcagaaagtattggttcagcatcaccatgtgccaggcacggagctaggaactgagatacaaagacgactgaaatgcgatttccctgtaagaggctggtggacctgcagccactgcaggagaaggaagacagactaaaggacgagatccgggaggaaagacacagaatcaggaaagtgggatatactgactgctatcagaaaagtgagattgggctgggtgcggtggctcacgcctgtaatcccagcactttaggaggccgaggcaggtggatcacaaggtcaggagtttgagacgaacctgaccaacatggtgaaaccccgtctctactaaaaatacaaaaaaaaaaattagcctggtgtggtgacgtgcacctgtagtctcagctactcaggaggctgaggcaggagaatcacttgaacccgggaggcagagcttgcagtgagctgagatcgcgccactgcactccagcctggggacagagcgagactccgtctcaaaaaaaaaaaaaaaagtgagattgatgtgttactgggagcaagaaagaggggtctctagcccagtaggactttgacaaaaagtgggaacacaagagaaaatcagttgtgaaactggagtgggaatttgccagggaagacaaagatgggaagggcataaagagagaaaatgcgtgagagagaaagccagaagctagatcttatgaaaggcgcaccttaaacccttcatcaggatcacagagactataaataattgattatctagctttatcctaaatgcctctttttccctcagccgtttccatcatggttgatgtacagcccttcactcctcctgcactctgtattcctctcatatccaccaccaattcctttgctgctgtttagtgagaggtgagggacactccagccccagcccatgcctggcctgggctgaccacgaagaacgaatttccatcactgcctggcagcggccatgtttgcagatgctccagccctgcagatggccctgggaatggtagcagagcatgaccccaggccctgtgcacacatgctaatgatttgactttgcatatagacagctattctaacatcagggcgcctaatctgcaggatatgttcagtaaatataagcagtgatggccaccagcctccctagcgtcattactctcacaataagtcctttctcaggctgctgctgctttctgaatcaagggcacaggtgcataaaaagcagttgcccccatttaattagaggatgacatgagtgtcaccaagctccctgccttgctgcctctcattctcttacgtgtcgttctgtccttggctctggttagctgctttgctcctgtgcccagctgctccttttcttttcttttctttttctttttttttttttttttttctcgagatggagttttgctcttgttgcccaggctggagtgcagtggcacaatctcggctcacgacaacctctgcctcctgggttcaagcgattctcctgcctcagcctcccaagtagctgggattacaggcatgtgccaccatgcctggttaatttttgtatttttagtagagacagggtctttctgtgttggtcaggctggtcttgaactcccaacctcaggagatccacccagcttggcctcccaaagtgctgggattacaggtgtgagccaccgtgcccggccagcatttcttttcttgactgtgtttccctctctttccctttgtctaattcttcctcccttttcacttggtccccctttcactttgttctccttctctattttctaacttccctgacctctttgtttgccctgaatttccatgtgttttcatcttcccacggctactccttgccccttttcctcatatttcctcccctcttttatttttaatctcccaaatgtctgcttagatgcatcgcccttgccctttgccatcttcctcctcccccagctcttgcctcctgagtctgtgcagtggaacacaggactatcagctgtcctctggcatatttcatgtaggcctttagttaatattctgtgtatctctgtgatcgatgcctgattgaaatgggattaatctgctcctctccagtaagaattatcatgaacttagccttattcatcttctattctaatacaatctatggccactgagatgatggtagctgcaattaataaatacatgaaacaccaatgtgtttatctctctgcatgctctcgtcacgggttagagtgtgaagggctggtttttaatccccacaattctcccagatttcatttctctgatgtgagttgcttttttattctttcactctttttgcacaagagaattttgttgtgcacatccactcttcctctctgggtgcctgctaaatgccagaggtggggctggcttggaagaaggggtatacattgcccagtatttttcggtgtctgcagtaagtggagtaattgcattttcaggataccaccattctcctctgccttcttatcataaccatgatacaggtaatctcttagagatttaacccttgtggagggaagaacaaggaatagaaaactaaaaaattaacatgtttcaagaacctatcccatgccagagcctgtatccttgcaatcatcttaagaactggggccgggtgcagtggcttacgcctgtaatcccaacactttgggaggccgaggtggtgggatcacctgaggtcaggagtttgagacaagcctggccaacatggtgaaaccctgtctctactaaaaatacaaaaattagccgggcatggcggcatacccgtgtaatcccagccacccaggaggctgaggcaggagaatcgctggaacctgggaggcagaggatgtagtgagccgagatcgtgccacagcactccagcgtgggtgacagagcaagactccatctcaaaaaaaaaagaaaagaaaagaactgggtatcagtatcttttctttaacaaatgagcataactaaatctgatacataaatgagctcacccatagttacacaggttggagaggtgtagctgagatttgtacccagggggacagctggttccaagtactgtctttgcaccaaactttgatatcctatagggagttgtgaaggtctgtttccctccttccgtccttttctcccttccttccttctttctttcctcccactttcctggtttgaggatcccaaactggttttgtggttttattctgcccttatacactctgttctacttttgtacactcaatttttgccatacaatttctaggtctttatatcaaagtaagttactcaggtacaattataattcccatttcatgaaaggatcttatttgactttatgacttactaagaaaatcccagaagtatataaaatctttgcaatttgaatgagccatcaaagttcaaagagaaaaagagttgttgggttgcctcttgattccttctttcatcctgccttcctgcttgatgcatcagtgcacacacacacacacacacaccgagttcatttttgcgtcatagagttgtagattctgcagatcccctgtttgagtttctgcctgcagcctcttccctccaaacaatgcagtaagcaccttggcgagaactctcatttcctttattataaaactgctataaagctgtgattcatttggagacaaaatgatttcctgctgagactttatgcgaagtgattagcaggtacataggtaataagctgacctaatatccacaccgcgtttccttttgctctttctaccatctccagccactctgcagcctcctttcattctgagccgaattgggtatcttcccttttagcccggcttgaatatgtggtcacataggagaccattggccacataaggtcagtggcgatcaaaaggtaaagaaaacagtctttttccaaatgaccttttgagattttcatctatgaacatctgctttgtgctctcccttaatgaattcccaaggttcttcttttaagatgggcagcgtggcctctcctttgagaagggggttgctgtttgcaagtcttgctattacccctggttttgattcttcatctcaggggccagagcacatattgaatcctccccacatccctgccacctgccaccaccattaagtgctgcacggttttttcataagaatagaacctgatcagtccagtaagcggcctggtaccccagtgttccttgttctgtcttgaaagaagcacccaaatgtcccctctgtaccccattacacatataatatccattaacccgatctaatgacatcagagtgatcatggttaattatagtggctgccttttagtgaagtcctacagggaaccttccataaacttggtaacttcacagcaacttaagtgttattgttcccatctacaggttaggaaagtgaggcttagaaaagttaggtgtcttgctttaagccacatagctagtaaatgatggaaccagagttgcgtaaactcagggttttttgtttgtttgttctggccctagatcctaggctctttccacaatgccatatgttgtgtctctgaagtggatatttcagccggtgtataacatgatgaatttcgtgtttagtactgtgatgaataaaaatagatatttaaaaaatatcatttaaacttcttattgatttaaattgccttttatctgttttgtgagaacttttaaataaacaatgaaaagaacttacatttacataatttaagaatcgaattattttgattcttaaatcaaagatttaaggctaatcaaagatatagccatggtcaatgccataagtctggtgtctatagttgtaagacaatttcctagctgcttcagaaatcttttctgctatgcctccaacatcaaacttattaaaaccccttcagcgatggagagctccctccctctctttgtagcccattctacagcattagatggttttttattaagtgaaaccacaggaaatggccattttttaggtcgaaatgatcccgtatcagcaatgtaataagttcaacctgtatggtgaggtcacatctacttctttgtcccattcactcatttgccttcattctgccttcactgtagcaccagggaaggttcccccttgcacttgaccagggtcctatggacattgaaatgtccttccttataattctcttctcttgtctattttttttcaccaactgctcttcagatgtcagggttcctagctcctctatcaccttgctgcttttttttctggaagtattataggcaagtcaaagaacaaacagcatacattctttcactcaacaaatgtgttcagggtcagggactcttccaggcactggaaataccgagatacctttggggcatttacaacttactggacagaaaataagcaaatagtataatataatgccaaataatataattccagagtgtgataagcgctctgaataagcagaagaagggaatacagagtctgggggaaagctggatgggtggatctctttccacagaagggtgaggaaaggcctaagaccttgagttgagccccagataaatctgttgtccaccatgtgtgtgttgttacataaaacaatgtaagtatctatctttttaagtgaccagactttctccaaaagtagaatagttaaataaatatttcgctaatatctaggataaattgaagatcaaacaccttcctgtcacctccctagaccatgctttaagtattcttgagaaataaaatagtctaacaaaattatcatctgggtttctgatgtaatcaaacatatcacaacgcatctaccttttaaaatggtacgaagtatttcctagaaattgaaattgacatccacagaattatgacgaatgagtaccaaggttgcatttcacagcacaagtatgactgtccctataaaacagattacaactaagcactttacgagagacttgaattactactgaagtcaatttcatttccataaaattcatttcggttttcttcccagtatatcaagttgaatctatttttgaagaaagactgccacttttcccaccattagtggcaaaagtccctccctggttttggcatctgtcttccctgccttggctggtgtcttccctcttctctcccctcccacttcagctgcttcccactagccatgcccaaacatacatagctgagcaaaaacaggcttgttagatggctgcccaaatctgcgtgggtaccctccttgccaagcagggaaagtcagccattgtccccacttcccagcgcctctgtcactgctgctggagttggtgtgtcccagcaggaaaaaggagccaggcagcctgtgccagcctgatgggtcacccatagcagcagccatgggcagtgagatttcctgcagtggtaccaggacctgctggattttacagcatcggtgtcatggtgcaccccttaaacctccagagcagaggatccctcccacagtccacaccaaatgttggccaaaatgacacaaagggaacttttactgtcatctttcctgcctaaggaatgtgcacacaaattggaagtcatgacaagaaacatatcttggtttggaggttttgtgatttttagatactcacaagagataaattcaatctgtcctgctagacgtgctcaggaggaagctccaatcctatcggaggtgaggcagcttccgtggactcaggaggggatcctccccaaggcttctgggttgcgccgtccacctgtcattggatctcaagcacacctgggacactgccacattaataacagcgatgatactgtgtgtgcaggcctggcctaaatcccaggcttgagttaactgacttagcactcagcatcatgctacaaggtgttattattattctgcagcagatgaagaagtgcagcacagagctggtaaataactactcaccgccacctggctggcggcagggtgtaacatcctatgcacgcccagcgagggcgccctgcaggagatgtgtttgcttggcagacaagttgcaaagaaggccggtgtcaccctctgggcatgtcttcaggacgattttgcagctctgtttttccgtcaacatcccttaggattgctgtcattctagaactggataacatgatccatttgaaatgagctattttagagaaatcagcgataaagctaccaattatataaatagttttattattgttacattttattatttgttaaagaccacaaagacatagagaggtggaagcatacatttcacttatttatgtatgtatatatttattttggtttaagtgaattttatttgaccatactttctctttgctttgttattgagtttaaccaagagttatttttaccagcccgatctaataataaggttatgaaactaatcaggcttcacaatttcctaagcaaccaccgcccccatggtttccaacttttctcattcactgttgttatgatcatgatgatgattttaactcttttttttttttacttcttttttttttatactttaagttttagggtacatgtgcacaacgtgcaggtttgttacatatgtatacatgtgccatgttggtgtcctgcacccattaacttgtcatttagcattaggtatatctcctaatgctatccctcccccatccccccaccccacaacagtccccagagtgtgatgttccccttcctgtgtccatgtgttctcactgttcaattcccacctatgagtgagaacatgcggtgtttggttttttgtccttgcgatagtttgctgagaatgattttaacttttttgtgaattgtccccatagggtcttctgaagacggccctggatttccacaaactgggaaaggtggagttcagcggcgtcagagggaatgctctgagtcagcaggtccagcaaatgcatgaagaatttcaagagatgtacaggcttctctcaggatcctcctccgactgcctgtacctccaaagcacggtagggttgggaagggctgaatcgccagctctgcctctgtcccggatgcctctcatctgtagggtctaggtatttacttgcattttccctgtgtatttcctttggctctgtggtcccagtggttttgctaattatcctttgtgttaggagaaattattattccttgtgccaagagaaagattctaattattctttgtgttgggagaaagatcaaggaggcctcttccaactgttaactgctccagactaatgacaccagggtttcagagatgctgaggtgggtatgacatgacagtggaggcggtggccaccctgtggcttcaaacgttttaagctcagtgaaagaagctagacccagaaagacaaatgttgcatggtctcaactatatgaggcatctgaaatagtcaaagtcatagaagcagagtggaatggtggctgccaggggtgggggagagggaaatggggaggtggtggtcaaagagtataaagtttcagttatgcatgataaataatttctggagctctaacgtacaacatggtgaagacggttaacaatactgtattgcaggccaggtgcggtggctcacgcctgtaatcccagcactttgggaggacaaggcgggcagatcatgaggtcaagagattgagaccatcctggccaacatggtgaaaccccgtctctgctaaaaatacacaaagtagccaggcgtgatggcgggcgcctgtagtcccagctactcaggaggctgaggcaggagaatcgcttgaacccgtgagacggaggttgcagtgagccgagatcgcgccactgtgctctagcctggcgatagagggagactctgtctcaaacaaacaaacaaacaaaaaactgtattgctttgctgtctcactcataagtgggagttgaacaacgagaacacatggacacagggagggaaataacacacactgggacctgtcaggggttgggggacaaggggagggagagcattaggacaaatacctgatgcatgcggggcttaaaacctagatgacggattggtagttgtagcaaaccaccgtggcacatgtatacctatgtaacaaacctgcacgttctgcacatgtatcccagaacttacagtaaaataattttaaaaaaagaaaaactgtattgcgtacttgaaattcgccaaaagggtagatcctaagtgttctcaccacgcacacaaaaagcaaatggtaactgtgtgaggtgatgaatatgttaattagcttgattgtggtgatcatttcacagtgtatacatgtatcaaaatatcaagttgtatatcttatatgtatacaatttttatttgtcaattataacttaataaaactgagggggaaaaatgttttaagcttcgggcaaaaactgctaagggaagaacaggcacacctggacagaattttattagtgacttggggaggtataagtgaagccacagcctgggttttctgatctgaacctggttcctaacagaacacataggataaggaaaggaccagagaagcattttccaggacaggaacaaagagcccgcatctcacctgtagccccaggaaagcctcaacctgtaagtccacatgcatgggagaaaaaaagaagaaaaagggccagtatgaaaacagagaatggaaatcccagaaaaaggaatggcagaattactggagaaggaattttaagagtgtgtgcgggaaaaggagaaagaaattagggcaggaatctgctctgagcaccttcagacatccaggggaatcttagttggccagacccaggaagattctaccttctaagaattctattagtcaaaagtagacccaaaaaaggtggaccgtagactatcctggccaacacagtgaaaccccgtctcaattaaaaatacaaaaaaatagctgggcgtggtggtgcacacctgtaatctcaattacttgggaggctgaggcaggaggcttgaacccgggaggcagaggttgcagtgagccaagattgtgccactgcactccagcctgggtgacagagtgagactctgtctcaaaaaaaaaaaaaagcagaccacaaagcaggctatatacaatgtatttgctaccctacaatacagtaaaacaaagcataatcccagggattttgcccagagaaaaaactaaaaactaagaagaaacatgccaaaatgtcatcatgtttgggaagtagaactagactattttttcataccctttttttttcacacacacatgcgttactgttacaaagcaataataacaaataattccacaaattagagattggcgtgaccaatgtttctctgaaaattgctacgtgctaagagaaatacattagggttgccagataaactacactaatttggacatactaaaaaaaaaaattcttgtttacctgaaattccaatttaactgagtgcctcgtagttttatttgctaaatttggcaatcttaagaacaaggctagttgctgtcttaaccaattaagaaggatttagaagaaattgtttgtattagtttaattagctttctttcctcctaatggctagattagtttgctgacaatggaaaaacagaattctgacttggggaaggaacgaaagtgggtggtaaagttgaaatagccccattgctggggctgttgatgctgcggtggttttcagggttatgtgagctggtgttatgagtgagagagaaggggcttcaggaagcagaacggaggagcatggaaagggtggaagaacaccaaactcacatctaattcatttcaccatcttgctggaaccctctaggtaaaaatgctgcaaccacagggtaactctacatggctaaaaattaagtcatgccatggtgaatttcagaaaattaaaataattctttggtataaccagttcaaacacaaaagttagctgtgaggagcatagtggggttggcttacagaaaattacgttttccttatatatatatggtgtctcttcaggactttgaaaatgacgtctctgaatttaaccagaaagtagaagatcttgaccgaagattggggactatctttattcaagcttttgatgatgcacctggcttggagcatgcctttaaggtttgtgtaaatggggcaggagccactcggtcctggatactcccccggccctcatcagaggatgatatggatacctttccacctgttctgttcctgcaactattaattattcttattaatctagtagagaaggatatgggaatccttcttatatcaagaaagtgtgcagaattgggattctcaggctaattacttatgctttcctgaaaatgtgacaatgtaaaaatacttttaagaagaatttctgcggtgatctctttaggtgccatacctttagcagtagggaaagtgtgaccatgcaataccatggctatttaaccatggctgctaggttgattcaatctggagcaaaccacctcccaggtaatgattgataggtttcaggcatcgataactggaataagaagatttgtgctcttatcatatcacgctcagatcaggtaatacaaagtgtatggaggagaaggtttaggacaaggcgtagatgatgcataggtaaatggctgcacagctgagaacgctgcatcgtgagacatgaagactcagtggagcatgatatgtgttccaccaagcaatcaagaggcttattctgtaaagctttaagggttccagtagttggtagaagttacaagaagtcacattgtggttcagtagaggaaagagatttctgtcaaagctgtttaagatggaatggacttctttagcaagtagttcagtttctgggcactgaaaatgttcagacacaggatctgtgatgggtgggacaattgtagaagaggcttaaaccctggatggatggatctgtgctattctagagtatttggtaacccaaatgcggcaggctccattagccattgaccatacatatacatgtagcctttaatcaataccgtaattcacattggaagccttttgagattcccctctccaagcatttgaaccaattccaaagaaagggcttgcatgtgtctacaaaatgatcatgtatgctattaactgtcagggatgattgaaactctgctgctcaggcaacttgtggggctgaaactccattcgtgcactaaggatgcccagacctacacatcacatagatccctctctaccagagatgttcaggagtcttcaagggatgcctcacaagtattctcaagccactttgaagtctttgaaatcacgacatctgctacatgtctacagaccccctttaaattttatctgccaagaaaagtgcttgaaggagtcttgccattgcttttcttctgatggtccccaccatgaaaacatgtctgtgtgtgccaagggcatgcctctttgggttccagaattccaatccttgaaattttatgggttctggacagaagtagagggagaccttccctctactgaagcagcactgcttgtacccagagtttcagagggctcataaaagcagattatttatcttctgaccttgactcttcttctcagctgagcttccagcccaggccttgggaactagtaggaaaaccataaccctccgatcccttctgcctactttgtttctctctttttggtgatctcaccaacaagaaactaaaacccttccttcatccccaagcaaaagcaaaatctccaattgacataagctcatgcagagaagaacattttcaaggctggggagtagggaccagagagagtacctgactctagatcccctgttgctgctgtaagatcatccaactactaggtggcccctcagtggacatgaatccatgagtacatccaggccaaggactgtgaacagacggtgcaggttggccatggtggtccctctgtgcacacacctgtacttcctcaacagaagatgggagccacagaactcggaaaagtctgctctcttatgcttccattgaggcagagctactttttactgtctccagagatctgggtgattgttttgtgaaagaaagtgtgaccctagatcctccccaatggaaggctttttagcacctttacagagtccttagagtgccttggaatcattaaggaaatccagtcaaactgtcagacctggaaaacatctggccaaggaccccatatttggcttttctccatacctggtcattctgcataacatggcctggatgcctcagacttctaggagccatctaagattgtgagctgatgccaatcagctcctagagcttgcactccctccaggattgggatgccagtgaagcaaaaaaatggcccaacctgaaataaggaggtaggataaagagcataaggtcttagacaaatgcagactgttcagcttccagttttaggacatgtggatgtaattttatatcgtgtttctcatgttcgttgacttaaagcaagggttccacatttttttctacaaaaggtcagagaataaatattttagactatgggtacatgtgttttctgtcacacactctttttcattttattatttattatttttatttatttatttttgagacagagtcttgctctgttgcctaggctggagtgcagtggtgcgatctcaactcactgcaacctatgccttctgggttcaagtgattctcatgcctcagcttctcgagtagctgggattacaggcacacgccaccatgactcgctaattttttttttttttttttttttttttttagtagagacgggttttgccatgttggccaggctggtcttgaactcctggcctcaagtgatgtgcctgcctcgtccttccaaagtactgggattataggcatgagccagagtgcccggccctcttttcaatttttttaattctcttttgaaatgcaaaaaccatgcactgagcagttttgggcagatttggctgcccactgctgtacttcgtcaccctctgacttcaagtgctaggtggagatgagaggttatcatggaaggcacgtttagaagcagtgtattggtatatcctaaatataactggagtcctacatggcctcatctcagaaaagcatcacaatggaagaaacacagtctaggagccagaaagtaattaaaagcatttcacatcttgattttgctgctccatgaaacactgaggggttagggcagtctgaatgcacaggaacacatcttcagagaaaggtcagcatcactgccattctcacggcacctgctctcagaaactatttccttgttcccattctcaaatttttgcccttcaaattctccccaacatccagccaacttagcttctttttcttttccatcattaccttctttctgttctaggttttgttttttttgtttgtttatttgtttgtttggtttttttttgacagagtctcactctgtcgcccaggctggagtgcaatggcacgatcttggcatcttggctcactgcaaactccgcctcccagattcaggcaattccctgcctcagcctcctgagtagctgggattacaggcacccgccaccacacccagctaatttttgtatttttagtagagacggggtttcaccaacttggccaggctggtcttgaactcctgacctcgtgatccacccacctgggcctcccaaagtgctgaaattacaggcatgagccaccgcgcctggcctgttccaggtcttaattatgtagttcagcttaaccttgctgggatctttagttatccctttgtttattggtttatccagattcttatgccaagtagagctgggggtgagtaactcggcagacaggaattttctgttagaagcaaaggagaagagaaagactatgaatatcatccacatatgaataattacaggtccagctccacaataacactgttcactcttcttacattggtaggcatataaaggaaaaccagaacactggatttgtataaccatggaaaggtttaatctgtgatttttttcctctttttcctccaccttccctacagctgctagacatagcaggaaacctccttgaaagaccgctggtagcgagggatacatctgataaatacctggtcctcatccaaatgttcaacaaagatctggatgcagtgaggatgatctacagtcagcacgtccaggaggaagcagaacttggtaggcttgttaaaggggattttgatggggacattctgttactggaaagaagcaactcattcctcttgtatttgttaaatgtccatgtatggatccatacattctcaaaaaagagcaagcacaaccttcttgcttgaaattccagaccaccttgggtgactggggagctctctgaactacggctttccctgtttctggggctgagattggcaggctgacccagcgtggtacagtcttcactgcttctgttcagctgagaccttggcattatggatgagttgacccttgatcagtgttgctacactgactaatcttcaacacgcctccattcgaaaataaatgtttacacgcctgagaaaagtttcttatgccttccaatgccatagcaaccatgcttctggtgggaggaaccagcaggagccctccaaagggcagtaccatgccaaggcgtgatgtctccatttttattatgatgctgcgtgtcaaaacaaatgcatttcagttttacgtacatttattgagtccttactacatgccaagcatgcctgtgggtcctgtatactgtggcaagtcaaggtaagggataaaataaataatgaatacaaaaggctggttctttatagaatgttgagtgctgctcggcttgagttgtaaagaatggtaacaagctggaagcgatggtgcgaacccctagtcctagtatctcaggaggctgaggtgggaggatcgcttgagttcaggagttcgaggctgcaggagctatgaccctgccactgcaccccagcctgggtgacagagccagaccctgtctctaaaaataaaataaataagaaagaaataaaatacattcctatagtcagtcgcacagcgctttgcacatagtgggtgctcaataagtcgttattggactgaatggcctctgacatctgaaaaatgatgccatttggatgaaataaattatgaacttcttattatgaaaagaaaataaagaagaagagactgtaactcttccttcctccccaagcaaagatgcattgtggatgggagattcgagggcaggcttaacaagacaagatgcatcgtgagtgggagattcgagggcaggcttatggaaaaggtagtcttgagctgagccctaaaagttgggagatcaacagtaaagcagaggagacaaaggccttcaaagcagatatgagaggatatggaatgtgatcagctgggtctgcctgtagccaaacaaggtgtgcagaagacattcattcggccatggcatttgaggtcagcttgggaagtgctcagtgtgccgccttagggaatttggaattcatgatcaagggtaggggaaattatcaaaggcttttaagtagctgagtaagaggattgctctgcttgcaagtaggtttcacggtgaggtcatcaagagttgcctccacttggaagtcattctaagaaaatccgttggccaagctttatgtgggattatccccatgacttcttacggtcagatacagagtttgaaaactcaaatgcctccagaagctatatcggtaacaaatgaccacgaccttagtaccttaaaacaccaccatccatctttcagctcacactttttttttttaagacggcgtctggctctattgcccagactggagtgcagtggcacgatctcggctcattgcaatctctgcattcccagttcaagtgattctcctgcctcagcttccagagtagctgggattacaggtgcctgccacgaggcccggctaatttttttgtatttttagtagagtcagggtttcaccatgttggtcaggctgatctcgaactctcgaccttatgatctgcctgcctcagcctcccaaagtgctgggattacaggcatgagccaccacgcctggccctcagctcacacttctgtaggtcaggagtccagcatggtgcatctgggttctctactcagagagaatcccaaagctgaaatcaaggtgttggtcagcctgagtttgcatctggaggctctagaggaaaaatccactgccatcctccttgctgttggtagaatccagttcctcatgactataggagtgaggtccccatttcctgttggctgtcagccaagggccactctttgcaactagaagccatctgcattcattaccatgtagccacctccatcttcaagccagcaacaggacgttaaatcctcttatgcatcaaatctctgccttcctgtcctgccaccagccagagaaaacattctgcttttaaggcctcacctgattaggtctggcccacccagggtcctcttcctcctgctgtatgacatatcatgaccacaggagtacgctgtcatcatagccacagttttgacccatgcttaaaggggagaggattatgcaagggtgagggtcattgggggtcatcttagagttttgcctatcatggaggacaagcaggaaatgaaaatcatggatctggactgagcatggtgacactagggaagggtggtacccgcggtgaaataaaggaagtagccacttctctagttgctagttagaaatgccagctgattcttgctaatcttctcattttaccagagaagctgggaagtgagattctttaaaaagcgaaacctcacatttgttaaatcttgacaaccaaatataagcagacaaacccattgcttgggctaacataagcatatctagtctgtgctgactcgagtccagggctccataatccacatgacctgcctcattcatcatcttatggaattctcacagaaactctggaagttaattaagcagggaagatattattcccattttatagatgtgaaaattgagacccagggtgattgagttgtctgtttaagggagtgtttcaaccctgactgttcaattagagtcatcttgagagcgttttaaaaaaacactcaattgtggccaggtgcagcagctcacgcctgtaatcccagcactttgggggattgaggcgggtggatcacctgagtttgagaccagcctgatcaatatggtgaaaccccatctctactacaaatacgaaaattagccacgtgtggtggtgggtgcctgcaaatcccagctactcaggaggctgagacaggagaatcacctgaacctgggaggcagaggttgtagtgagccacgattgcgccactgcactccagcctgggcgacaagagttagactccttgaaacactcatggctgggcccctcccagagcaatgaaatcagaatagcttgggcatgggacccaggtcccctgaggctgggagtgttcgtctcagggttactctttcttcctctttaacagaaccccccaggaactccagtgtgctcccaggtgactttagtctggagataatgaggcaaaagtggagtacttggtgggaggtgtttgccgagcggagaggactgaggtgctctagactcatttcggtctgtctgtgccatgtctccagggttctccccggtgcacaagaacatgcccaccgtggctggcggcctccgctgggcacaggagctgaggcagcgcatccagggtcctttcagcaactttggacgcatcacacacccgtgagtattgtgttcctgaaagacaggcttgtcttgggctgctgttcctgctctagaatctgagtgttgtagaaatgcaacctgcttaacgaaggccagaaaatcatcttcctttctttccatttccagcaagggattagacacctattggcaaaacagtcatgatattgatgcatttggactgaagggcagggcccttggtgttaagtgctgtaactggctgactcattttgctctgggggattcatttctggaggacagtgagccagggattttaagctctgtggagttcttccacacgtctccctttgacatcatgtctccttgctgctgaggccactggaaagtaatgaagcccagtgtttcctcaagtgcagtatgaggtctctgtccatcaggataactctggaaaacctgttaaagatgcacattccagggcctcacctgtcactggctgaatctgaatctggtgtgggctgtgaatctgccccttcagcaagctcctcctgtgattctgacggtgaccaggtttggaaaccctcagcttgcttcatagctgaggttagaagctgagatagaagcaactcagctgctaattgtgatgttgtgtttaagacgctggctgaggaaaggcagtctttctctgatacctctttctaaaagacttaatcttgctgacagcacacaggttttggaaaacacaacagaaggaaaagaatcaaactctggccattggactcacaggctttttggagttaggaagagccttagagaccctctggtctggcccaagtgggaagactcaacaccatcagaggccagacaaatggatggccaggatggggtctgcagggggccaccagcaccccactccagcattgccaagcagaaaagcagacccaatgtgagcaatctcctgactgttggagataagctggaaactggattttagagttggacatccaattttccaatgatcaaggattccattttttctcaaactctgtgcagaactaacaaagcatgcctgtgaggcaggtctgcccagcgggtgacccatttgcagcatctgcttgggtgtgggcgagatctttattttcagatgaagaaatggaggaaatgaagagagaagggaggtgacttgcccaaggtcctagagacagccaaagaaagaactggaagaaatgcctgattctccaggctcctaatccagaatgcttcccggggaccccccagccctggaagtttggcggggagtagatctgagccctcatgcatctcaatcacgcagcagaaggcagaagggagaagataggtgaatggggtggggaggggtgccagggctgcccctagaatgtggactgccacagctgtcacaggtctggttcccaggaagcagacctatgatgtgtgtgcaggaatttatagagatcctttcaggaacagcactcatgaggaagggaggggaaacagatcgggcagagaaagaagttgagctgctgagctgcaagaaagttgcaatgggggtctcagctggtcctccagggagtttgggcccttcagagctgttctgcctccgtacccctacatcagctggtaggatgtgggctttcctggggaggggcgtgacctttgggtgaggcagctctctctggccaaggctgctcccaaagagggaggcagcggtacttctgcagcagccaacactcctggctggaggggacagggcgaggcaggggttgaagcaggaaggtttggaggtgtaccagggcctggtcccaagaggcgatctggaaggcacacaacagagacctctataattcccgtgaaaactcccccttgttttaaaaatgaattcaaatgtgtattatgggccgggcatggtggctcacacctgtaatcccagcactttgggaggctgaggcgggtggatcccctgaggtcaggagtttgcaaccatcctggccaacatggtgaaacccatctctactaaaaatacaaacaattagccaggtgtggtgggggcagggggcggggggcgcctgtaatcccagctactcaggacgctgaggcaggagaatcacttgaacctgggaggcagaggttgcagtgagccgagattgcgccattgcactccagcctgggcaacaagagcgaaactccatctcaaaaaaaaagtgtattctattctataataggtattgattggttattgaaaatgttttagattcctcaccatgaagtgacatgggaactgcaggaatttcactgtgcttattcctgtgacttcccagacccactcggccacacgcccacgtgagaagcctcactctgctctggcctcattcttttctagatacaaaactgagacccggggttggggcctgtggggcttgtggaaatcacacagcttggcaagggaaagcgcccattcgggctggagcatattctacctctccttgctgcctggcagatgcatctgctctttcatcacaaacgtggactgagtaatcagggggaaaaaaaaacgccagcaaattcattgctttctctgcaggcgctagggcttctgtggaaagctcgagggatctgatgaagaaatcctatgttggtttaaagagcagatggattttaaggaatctctgcagtaagctgcctcattttgccagcaggtcaaatagaaacaaaccaccacatagttagtgtgaagattttgaagaattaaagatacttcaccaatttcttccaggactggactttcattagtgttgtgggaagtgtcaaaaccagttgagggtaaccgtacctcgagccacactctcttccgtggtccttagcattcctgcagaagcctccatttgtgtgtgcacacttgtgtttacacatgttatatgtacgtccatgtgcactttcatgtatgtgtattacatgtgcacatgtttcaggggtaagagctgggagggaccctcatgtaaaaacgtgaagaagtggtagtgtttcggatcgcgtgttctagatggatttcagaaaaggggaaacatatatttaaatatataaaaaacatgttaatatatctgtacctatatagatatttacctggcatatagtgttatagacaatcatgtattacttcacaatggggttatgttctgagaaatatatccttaggcaatttcatcattatgtgaacatcatagagtgtatttacacaaacctatgtctgtggtctagagtattgttcctaggctacaaatgccctatggtctagcttagcctaggagcaatacgctctatgatcaacacgctctatgatcaatatgctctatgatcaatacgttctatgatcaatacgctttatggtctagcttagcctatgatcaatacactctatgatcaatacactctatggtccagtgtattgctcccaggctacaaacctgtgcagcgagtgactgtcctgagtattgcaggcaattgtagcactatactaagtgtttgtgtatctaaacatatctgaacatagaaaaagtacagcaaaaaataaggcataaaagatttaaaaaatggtacgcttgtgtaggacacttaccatgaatggagctcacaggactggaagttgctgtaggtgagtcagtgagtgggtggtgagtgaatgcgaaggcctaggacattactgtacacttttatacgattggcagcacagtaggtttgtttacaccagcatcaccacagccatgggagtaatgcgttgcaccatgtcaacaggcaataggaatttttcagcgtcattaaaatcttatgggaccgcagtcacatacgtgtatatatgttgaccaaaatgccattatgtggtgcatgactgtatataacattgatggtcttaaatacagaaaattacagcacctagaattttttcatatctcaatttcccttttattcagatttttgaaggacctcacataccttgtgtgtgactggctcagctaggtgagggtgctggtggagctgcgggcaggaaaggttatgagagctctgacacttgcggagctgcctgcgtttcaggaagtgcagatgccctctagtggccagagtaagatgttcgcgaagaagaaaggctctttcagggctgtttggaaacgagccaaggagctattcacgctcttctttggagactgcagtttgttcctcggattattactttaacttcttctaattctgtgtcactttttctcttttgtacgagtagttgcatggaatctgcagaaggaaagcgaatgcaacaaaaatatgaagatatgctgtcattgctagaaaagtaagcaacttctggcattgcgtgggtctgcagattgcacagcctccatgctgccttttgcagctccgagtttgtgcagattcctcagtggctccgaagtatcactctatgttttatgttataaccacgatatttgtgagtacagtatttccgggttgcacacacacagggtatctggggaattcagctgtattctggaaataaatacttttccagtgtagttttgctgggagtgtgaactagagctaggagtggggtgctactcatggaactccgagacggatgtcacggaaaattgcaacagctgcttactcagcagaaagcaacagtgcatgctgcacaaagaggcaataagttttaaaaagtacttcctgcatcattttattgagaaagcataagagtgaaaattttatatgacttcaaagttgtaactgctttaaagctgaataagtctttccagggcttagggtctagaaacagccattgtcttgatttctccttctgccatttgttctttctcctggttcaggagggaagaatggtggccgttgagattataattgtgattatgcttagcattgttccagacagattaattaacagcacctctacctggcaagtaacacacattccaccccttttacctctaaaataacttcaagtccatccactcctctttgtctccaccaccagtgtcttcacaagagactggaacttctccaggctgaactgctgcagtggcttcctaacagtccttgctgcctccagatctgttcccctcagtacccacattgttaccaaatccaataatgtcaccatagccaccaccagctgggaggccttgcggtggttctcacagcctccttaacatgacatgaaaagtcttccttgaggtggtttttgcctcctcgtcaccacctccagcctctgccatgctctgtagtccttgtttcaagcacacagtttcaagcatgctgtttctcacctctaccctttggctacaccaggaatgctcactctccctttgccacccaacctctggccatcctctgagacccaagcaagcatcccttcatcacctctcctatgaaaccttccctgacattctccttatcatccccagccttccacctctgctattaggtgcctgatgtcctgtacatttctctttttctttttcttttttttttttttttttgagacggagtcttgctctgtcgcccagattggagtgcagtggcacaatctcgactcactgcaagctccgcctcccgggttcacgccattcttctgcctcagccacccgagtagctgggactacaggtgcccaccaccacacccggctaattttttgtattttttgtagagacagggttttaccgtgttagccaggattgtctcgatctcctgaccttgtgatctgcctgccgtggcctcctaaagtgctgggattacaggtgtgagccaccacgcctggctaattttttttttgtattttgagtagagacggggtttctccatgttggtcaggctggtctcaaactcccaacctcagatgatccacttgcctcggcctcctgaagtgctgggattacagctgtacatttctttaggattgcagttgctgcactgtgtcagggtgatctgttggcctgcgatccccaccattaactgcctttactgtcaggtactcatccatcatttgtatccccgaagtccagcacatggtaggtgcttggtcagtgtgtcatgactgaatgatgaacgtccatgagctacgtaaagattagtgtgagagcgaatcttccccagtaacttcttgcaacatttactgagactaatcacaacttccttatcccctcaaaagatctcatggggtctttctcctcttctctgatttaagcaatgctacctttagaaatctgtggctatggccgggtgcagtggctcaagcgtgtaatcccagcactttaggaggccaaggcgggcagatcacctgaggtcgggagctcgagaccagcctgaacaacacagagaaaccccatttctattaaaaatacaaaattagccaggcgtggtggcacatgcctgtaatcccagctacttgggaggctgaggcaggagaatcacttgaacccgggaggcagaggttgcagtgagccgagatcacatcattgcactccagcatgggcaacaagagcgaaactctgtctcaaaaagaaagaaagaaatttgtggttactctcagaagctgacccagcctggttgggtcaatgactagtagtatcttcaatttatgttacagatcatgaccaggcaccggtgagctgggagggggcttatgaggtggctgttgtctctgacccttgcaggtatgagacaagactttatgaggattggtgccggacagtatcagagaagtcacagtacaatctttcccaaccacttctaaaacgtgacccagagacgaaggagatcactatcaactttaacccacaggtcagttggctgacagtagctctcttttgggttcctgaagagtttctttgaactctgctgatttcaaaagcgtaaagacttttatttttttgagacggagtttcactcttgtcgcccaggctggagtgcagtggcgcgatctcagctcactacaacccctacctcctgggttcaagtgattctcctacctcagcctcccagcacaaagactttttataagaacatgcaaaagattctcaaaataatttgtaccctggatttcttttttgggatgaattctggggtgtagtgttttattaagttgtccatgttcacatttttcactagggttgctcaatatatttgcttcaattttgcacaacaggaagtactacaaaagatcaccaatcatttggtaacaaacatagcccactgggcctaccttgaacttaccatgtctgaaggccattgactagatgctggagggccaaccaagtgcatataagacttggctcctgccctcaaggaacccacggtctagttgggggtcacaaccttaacatgcaaaattttatcttcactagatggcatatggtaaatcccagaggagtggctttggaaataagactctagattagtggttctcaactggtggtgattttgtcctcctggaaacatttttgtttgtcaaactaggcgggagtgccaatggcatttagtggatagatagcagggatactgctaaacttcttgcaatgcacaggactgtgtaccaccacagagttacttgtcaaaaatgtgaatagtgctgaggttgagaaactgttttagatgatcagaaggatggaagaccagtggggaccgtagcagccacagaaagtttaatgctggagaaaaatgataactaaaggttagttggtttcaaaaataatattactcaggttgaaaaaaactgtattggtcacactaagctaaaagcagtcacctacatctgccttgatggcgtatgctccaggaatgcactatagattgagctgaaaaccaagctgatagcatattggtgtctttcaagaaaattgcaatttaagtagaacattgcttcctcctctgcaatcaaagtcaacaaggaatatagagaattcatgtcttcactttggcaagacgtgagtctgtttaacttactgaactccttggatcaatttcattggcattcactgtgagcaatattgaatattaaatgcctaaagagatgaatatctggattaccaagtaggccacagtttccatgttgtaatatagtaattaagcccttgagataagtcctcagtataagatatattactatatagtaattaagtccttggtatataaccatacttggtcatgtattgaagatggaccagcctctgtatactccaaggacaaggaccttatctgccttaatgtgtaacacatagggcacactttatagatgtttgcaggccatagaagggaaaggagggaggaaagaagaaaaaggggggtagggataaatattaatacctaaactataatgtgagttgatgggggacaactacaagcttaacaagtcaaagaagaacaccatcacaccttgacatacaacttcaagcaatgtggccaaagctgggctattaagaatgaacagggccgggcgtggtggctcacacctataatcccaggactttgggaggctgaggtgagtggatcacctgaggtcaggagttcaagacgagcctgactgacatggagaaaccccatctctactaaaaatacaaaaaattagccaggcgtagtggcacatgcctgtaatcccagctactcaggaggctgaggcaggagaattgcttgaacctaggaggcagtggttgcagtgagccgagattgcgccattgcactccagcctaggcaacaagagcgaaactccatctcaaaaaaaaaaaaaaagaatgaacagtaacacacttatcttattagtctagagggacatgatcagaaatttgcccctctggggacaggataagaattgtataggttaagtttttcaaatttatgtaaatcatttaaattatttaaatgtcttattgttgggcatttacatcattttacagtttcatcagtctatatttcattgattctaggaggcatctttttacatatttatatctctgaaattggcatgtttttagtttaatagactgcatgtttttgttttttcttttgttgcgtataaaataatagtgaatcttacaattgatgacatcttaaactggataaagcatggtataaataatgctacaacaaatatccctagttttgattgtatgcattcctgattatttctttaggataaaagtccagaaatggaatttctgggctaacgggcattcacattttgagacttttcatgtatattatcaacttgttctttagaaagatgaaactcagtcattttcctgccaacaagatactgttcatttcttcaaatagtttccagactgttgaactaaaagaaaaaaactcaatgttgttcaatttgcatgtatttgattactagtaaatgtgaatttttatcatatattcattactcatgtatatttattcttctttgaattgcttgttcatgtcctttgcccacttgctagtggaagtaccctctcttcctgtgaatttgttaggatacttaggaaatatgtgacagatactaagaaatctgctccaaaaattttgccagtttaaatggccaaatatgttggccattttatgttgatattttatgcgcaaaagtttttatgttttgtggttttatgtttggaatgactttctctacttccctattatattaatagccccacatctttcttttaattattttcttttcactttttacagttaaattattaatatctatcttgagctagaactagaagactgagtccatttccccacaaaatggttagcatttgtctgaatgctgagtagggtttgcccactagcaataaagaattgacccagagtactggaaggagagctaggagccaggtgtcttcatatgagggggagatagggagaacctggggccatctgttcatcacttgtacctatgcccatcagtcctcatgggttcagacagaaacatcaataaataaggaaggatgaagaagagagtgcctggaaaccctgtttcattggacaaatctttctccttggcttctcacttcttcagttgctgctgaatttgggaccccacagaagttcaacgcagcctggatgagttccatttcctgaacccctagcatgttaagacacaaggaaatgccagcagagagttacagaagttgtgggatattccaaatgattacattgaataactaaagttttattatgggcacctcctctcaatcctgccagtgtctcgctataactgtttcatttggagagaatgccagaagtctgaacttgaggcttctcatgaatgttggtagcccaggccagatgattctcctcctttaggccaccacccttggatgggaactggctgggcccctatgagcccatcatttccgcagccacattgtccaaagcacagaaggcagagccctcccctgctatcacacttgtctctgttctcaggttttcctcttctttatgatgtatagatttaggagccttgtttctttccgagacatcttccttctgcctgatacttgattttccttttctgagactagatttaagaaactgataggagcagaacttaagaaaagacccagaagatctttgggcctcctgggattgtccagtctttgaccaatgctgcagattattcattatcactgaacgacagacacttgtgttgcttcttttctccagctgatttcagtgctgaaagaaatgagctatcttgaacccagagagatgaaacacatgcctgagacagcagcagccatgttctcctccagggatttctatcggcagcttgtggctaatttagagttgatggcaaattggtacaacaaggttatgaaaactctgctggaggtggaatttccattagtggaggaagagctgcaaaatattgatctccgcctcagagcagcagaggagactttgaactggaaaacagaaggtaacagggcaccatctgaagtctgacaaaaacatggagattcgaggatctaataaagttcatagaacctccaattattccctggtaatcttatttggggttgaaacataagtctgtcttctcctttgacacatatccaagcagagaaggcaagaagggttggtattcctttttttccttttctatggatatagttgataaatttagaaaaccttgttgccatgcatgttgggaggctcagaagttgcataagatctcctacagtctccagcatatattgggtgctccatgagtgacagctcttactatattatctttgttatttaattttcttaactagattgtaagcatcttaaagcagtatgcattgacttctctggtatctctcaattcaatacactttcattggctgattaatacgcgcagggtactgtgtgacaaattagatttgaggtgtatgggacatggtctctaccctcaaagagctcacatttagtggggacaacagacagatatacaacataacttatacagagccatatgatgactttcatgaaaagccatcatagaggtaaaaatgaagtgtgatgaatagcaggagagggattcacaggagggaatcacaggagagggagattaattcgaattagggtcctcagaagtgttaaagtttgaaaaaaaaagattatagttgattcatgaaagtcttagaatgccatattaaacaagttagaactttatttcatatacaagaggaaaagacattttcaaaatttaacatgatgaaagtgcttaaaacattaaaagaaagattaacccaaataaggtcatcaagtctcactggtgtttggatataagattgcattccctagcagctgtaccagcttttgtgtgcttggtaagtaagcattacctctttctcttcctccataatcaggattatggtaagggtaggctttttttttttttttttttttttgagacagagtctcgctctgtcacccaggctggagtgcagtggcacaatctcggctcactgcaagctctgcctcccgggttcacgccattctcctgcctcagcctcccgagtagctgggactacaggcacccaccaccccacccagctaattttttgtatttttagtagagacagggtttcaccgtgttagccaggatggtctcgatctcctgacctcgtgatccgcccacctcggcctcccaaagtgctgggattacaggcgtgacccaccgtgcccggccagggttggctttttaatacaactaggagggagaatattctgacgataatgaagttacctgtgtagaaaagtcttataacactcgcaagtattaaatccctgtctttcatagcaactagccctttagctatgccactgcaggctatttcaattaattatgtttcttttggggaacaggcatttgcgattatgtcactgaaatcaccagtagtattcatgatcttgaacaaagaattcagaaaactaaagacaatgtggaagagatccaaaacatcatgaaaacatgggtgactccaatatttaagacaaaagatggaaaaagggaatcccttctttctctggatgatcggcatgatcgaatggaaaaatattacaatctcatcaaggaatctggccttaagatccacgcccttgttcaggtaataacccagccactcaggcgcacatactacgagtttagggaaagcatcaaaaagtgtgtttggatgaataagtgattaggacagtcagtaagtgcagtgtcttccgaagacaaggatagaagtttaggctgatagcaaaagactaaagctgatagactgggcaaatgaaaagttgcattttggtatcaatgtgttgaaattattactatcttcatggtgacaacatttaattgtcacatgacttcggtctcacacctacccccaagggaacagaagaagatgacaagggcaaaattccaaattatccactgcagtaaccatccccatcccggcttgcccacacaacatattgtggtcctccagcatcatccttataacccggctccgtagagcctaaagaaatgaaagactaccgtggtatccctaactgtgtgtgataagaggaaaaaatgcagagtgctacacttcatgctgtaaagctctgccctgcattagtggtcagggaaactttacgtcccatcatcaaagactgaagcttccttgtgaacaatgggaaaggattataaatggccaccagctccagccctacgcaagtagctatagggccatgtctgacaagttgactcctgtggaaagtcacaagtgaatcacagttgttatctgtggattttctgtggtttgaagcacaataaaaatgttgagccttaagcactaatgattaccagaattaagataattatcccaattttatctttgagagtaaagagctgctcaagttgaagagtccctcaagttgatttaatttttaaccccttctgtccccacatccagtaaatcagcagctgttgtagaacccagccatctgcttttcattcgtctttctttcatccaactgttcattcatccactcattcacccatccatccatcagctgtatttccatagctatcctgggcactgtatcgaataccaagaaaatgtaagatatagtccccgctttgaggtagaagaaaaccatcaagcaaaaaaaggaattacttaagattttaaaagtttaaaatcgatctaggccgggcgcggtggctcacgcttgtaatcccagcactttgggaggccgaggcgggcggatcacgaggtcaggagatcgagaccatcctggctaacacggtgaaaccccgtctctactaaaaatacaaaaaaattagccgggcgtgatggcgggcgcctgtagtcccagctactcgggaggctgaggcaggagaatggcgtgaacccgggaggcggagcttgcagtgagccgagattgcgccactgcactccagcctgggccacagagcgagactccgtctcaaaaaaaaaaaaaaaaaaaaaaagtttaaaatcgatctatcatccatctatcgtctatgtatctatctattgatgtatcacctatctatgtgatgacaaatgctcaaatccatgctcttgaaagtcagaatgagaaaaaattcagacaaatcacaaaatcagtgagacaagcacagtgacctagaaaaaagtacatattgtaacattttaattatccaggggtcaaccaggaaataaccaaaaatggccacaagccaaaatacttatcacaagagtctctaaaagttcagacactttaataataattcttactataacacaataatagtagttgatatttatctagtatctactatacactaccatacagtgccaggcactgtcctaagcattgtccatttcatgtaattctcatgaaaatcagatactttcattatcattttattgataagaaaacgaaggcacagacaggctaaattaattgtctgtagctgcccagttaataggaagcagagctgtctgactgtagctctgcatttatccaatatattacacaacctccagggtagtcataaaggtccctcaggtcaaatacaaaacttagtaattaggccttaaataatgtttgccttttgataatttaaatatttttagacaaaaaccactgaacagaagctccacgaacagaagacatttttatctttttctgctaattggtacataggcacccatcacccaagcagtgtacactgtacccagtgtgtagtcttttaccctcccccacctcccaccctttcctccgagtccccaaagtccattgtatcctccttatgcctttgcctcctcatagtttagctcccacttatgagtgagaacatacaacgtttggttttccattcctgagttacttcacttagaataatggtctccaagtccatccaggttgctgcaaatgccattatttcattccttttcatggctgagtagcattccatggtgtgtgtgtgtgtgtgtgtgtgtgtgtgtgtgtagaactagataaaagataaaaatttagagaaaaagataaaaatttcttctgttcatggagcttctgttcagtggtttttgtctaaaaatatttaaattatcaaaaggcaaacattatttaaggcctaattactaagttttgtatttgacctaagggacctttatgactaccctggaggttgtgtaatatattggataaatgcagagctacagtccccatgtatatatatatacacacacacacacaccatgtatatacatagacacacacacacacaccatggaatgctactcagccatgaaaaggaatgaaataatggtatttgcagcaacctggatggaattggagaccattattctaagtgaagtaactcaggaatggaaaaccaaacattgtatgttctcactcataagtgggagctaaactatgaggaggcaaaggcataagaatgatacaatggactttggggactcagaggaaagggtgggatatatatatatatatacatatatatacacacacacacatacacacacacatacatatacatatcacaatttctttatccactcattgactgataggcatttgggctggttccatatttttgcaattgcaaattgtactgctataaacgggcctgtgcccagtatctttttcatataatgacttctttttctccaggtagatacccagtagtgggattgctgggtcaaatggtagttgtacttttagttctttcaggaatctccacagtgtttttcatagtggttgtgctagtttacattcccatcagcagtgtaaaagtgttcccttttcatcacatccacgccaacatctatttcttttatttgtttggttatggccattcatgcaggagtgaggtggtattgcattgtggttttgatttgcatttccctgatcattagtgatgttgagaattttttcatatatttgttggccatttgtttatcttcttttgagaattgtctattcgcatctttagcccactttttgatgggattgtttgttcttttcttgctgatttgctataactagatttttaaaacagtgtacccaataactgtctatgtcactaattatcttctatgatatcatgcgtaacgtttaattgtgtggatgcaccaggatttgactaactcatcccactgttggatatttgggtacagttggttattcatttattaaagttgtagtataatatacatgcagtacaacgtacagacaaaaagtatacatagagctcagtgagtttttacaaatgtatacactcaggtaactaccacaatacagaacgtttgctattaccctagaaagttcacctgtccctctttccagtcaatacatccccattctcctgcgagcctcaatcactgatcagctttttgtcaatatagagtagatttgtcttttcctataaatggaattacgtagcaagttctcttttgtgtctgcctttttaaaacttagcctagtgttattgagatttatccatattgttgcatttatttcgagtctaattctttttattgctagaattccattgtatgaatataacagaattcatccagtcccctgatgatggtctttgagttatttctagtttcagactattataaataaagcttgtatgtacagtctgatataagttattccatggacatatgttttcatttctcttgagaactgcagggtcatcagtaggcatatgtttaatgtgtgtaagtaatagcccagcagttttcaaaagtgattgtgtagtttatactcccagtggcagtgtaataaagttcagttgctctacttcttcaccaaattgtgggtttatgttgtggtcttttaaatttttaccattttagtcagtgtgtttttgtatctcactgaaattttaatttgtctttccctgaagatttatacttttgaatattttttcatatgctgattggccaattatatgaattcctctataaagtgtctaagtgtttttctcattttaaattggatggtttatagttctagcaatcgtttacagcttctggttacacatcttttgacagatatgtgtgttgtgaatatcttctccaaattggtggtttacttatattcttattgatatatgttgatgagaaatagttttaaattttcatgttgtgtgatttcccttttctcctcttgtggttagtacttttgagtcctaaggaaactatttactccaaagattgcaaagatatcttttattttttttcttttagaagttttacagttttaacttttttattcaggagtattatctgtcttgaattaatttttgtttaggaggttacaggaattgagttcattgttttccatagtaacatctgattgttcccatactattaaaaataactttcccttttgaattttttggcacctttgttgaaaattgattaattgtataaaatattaataaaaaatatatatggtggaaaataccaatgccacttgttcttgattattgatcaagagaaaattgattatcagtaagtctgaaaatcaggttctatatgtcctgcaattcagtttttccttttcaaggtcattttgactagtataagttctttacatatccacataagttttagattcagcctgccaatttctagggggaaaaaggctagatgtgattttgattgagattacattaaatctgtagattaatttgaggaaaataaagaccttaacaatattgaatatagcagtttatgaacccggcatatctcttcacttagttaagtctctaatttttctctgcaatgctttgtagttttagtgtagaagtctcacacattttccattaaatctagcaccaagttttttatgtttgcagttctacaacaaatggaattgttttattaatttcattttccaattactatcaggtagtgtatacaagcatcattgatttttacattttgatattatattccgtgatctttctaaatttattagatgtagtaattgctttgtaaatttaggatgatgatctatgtaaataagtcatttgcaaatagagacaatattacctctttatttccaattttttatgtctttttttttctttttggccttattgctctggctagaaccttcagtataacgttgaagtggtgagagtagaaatgctcgcctcatttccaattatatggagacacatttggtaattcaccattaaatttttagctgtagggtttcatggatgttctttgtcagacccaggaagaccccttttattcctagttgactaaaagagtttcatcatgattaaacatcgaattttatcacatgatttctctgcatctcctgaggtggttatataattttactccttttttctgttaatgggcactttgttctttttttttcaaatgttaaacccaaatttgcatttctgagataaatgcattcgatcatgtcatattaatcttttcatgtattatagtatttgctctgataattttaaaagatttttgtacgtgtgtttaagaatgacatttatcttctacttttattttcttttgatgttcttgtttcggtgttaagattatgctagcctcataaaatgagttgggaagtatttcctcttttattttctgaaaaagtttgtggaaggttggtcttaactcaaccttaaatatgtgatagaattcaccagggaatacttctggatatggatgtttcttctggggaaagtgtttgataattatttcttagatagatgaaagactatttagattttttgcctaacacctttattagtttttgcaagttgctttttctacaaacgttttcattttatctaagttataaaacttactggcaaaaaaaattgttcataattatttcttattatcattatgtgttggcagaagagctgaggcagggcttgcttgtctgacataatgtaaaagagtcttggaacatgtcctgcttccagggtctaaaaccccttgtggcctatggaacaccaagctctgtgccaaagggtggaaggctgccctgctgcactgcaatctaagcccagggcataaaaccccttgtggctgggagagaacccaggcatcagggcataaaaccccttgtagcctctggaatgtgtccagactcactggccccttgctccttgctctcccaagatcataaattcattgtatcttgaattagaagaacctgttttcccttatctcaagtagcagagcatatgctaaaccgtcacagctacgcttgatgcaccactacctttctatcctcacatcctcatctttctacccctacatcagcacgtcctcaccacctgcttctttgtttgattaccagtaaatagtgtgggctcccagagctcggggccttcacagcctccaaactggcgttggccccctgggcccaccctatgtactcttaacttgtcttatctcattcctttgattctgctggacttcgtagcccccacgacctggtgtttggtctgattaccccaacattatgtgtctatgggatctgtagtgctgcatcctttttcattcctaatattggcaatttgtgacttgttttccttggtcggttttgctagagattttttctttttcttaattttataaatcctttcaaagaaccaaattttgattttgctaattttctctattcatctattttctagtttattaatttatgttttttagtatttcattcaagttactttagggttagttgcttatctgtttttagcctgttagggtataaacttagggtcttgattttaagcctttctcttgaatatgggctgatggtgatactagttacccttttagtagtgctttagtttcattctacaaatttgatctacctcatttgcattgttattcagttttaaatgtttctttttttttttttttttttttgagacagagtcttgctctgtcccctaggctggagtgcagaggtactgtctcaacttactgcaacctgcgcttcccaggctcaagcgattcttgtgcttcagcctcccaaatggctgggattatagggatgtgccaccatacccagctaatttttgaatttttagtagagatgaggttttgccctgttggccaggctggtctggaactcctggtctcaaatgatccacctgccttgacctctcaaactgctgggattacaggtgtgaactaccatgcccagctcttgttataacttattttactcaatggtcactttgaagtttgttgtttaatttccatatattcagagcttctctggatatctttaaaaattgatatctaatttaattctattgtgctcagagaagatactctgtaagctttcagtctttgggaattttctgagacttgtttcatgacccagaatatagtctatcttactgagtgttccttggagacttgataataatgtttattcttcttttgttgggggtagtgttctataaatataaattagttcaaagcaattgatagcattgttgtgatcttttacaggctacttgttctatcaattattgaaggtagagtgttaaaatctccacttacaattttggatttgtctatttcaattttagttctgttaaatttttttgtcatgtgtttgaagttctgttaagttctgttataataactataaatttcacatttataattataaatgtgtaacattttagcacatttataattattacaacttcctgattaattgaccattttatcattatgaaattccctttttatttctaaaaataccctcttgttttgaaatctatttttttctgataataatatagcctttcctatctgattcattattcttactttttgtattttgcatcttttcccatcattttaccttcaacctatttgtttcttggattgaaatttcttgtcttaatagtcggcatataatacaaatttatttttttaagtctaacaactctgcctattaattggaatgcatagactgtttacatttaatgtaagcatttgtatggttgaatttagctctactaaattttgctttttgttttctatttgcttcattgctttcttgttcctctgctcttccattgtcacctgctttttgggtaactgtatattttttagtattctattttaatttctcaattggcatttcagctttaccttgttgcattacaattctagtggttgttctaggtttcagtatgcatcttcagcttatcacaatctacttagacttttcctacagaaaccttgcaaaagtgtggtgtaatttaacctctcacctattttttatactgctgttgtgtgagatatttatatatatgcacacacacataatatatattaatagtaaaatatatggtatctattaatatgcatattgagccccacaatgcagtgttatagtttttacttttaaaatttaagaaaaaatatttacagtgttttatatttactcacatactcatcatcttcaggcttgttattcccttttatagatataaattaccatctgggattatttctcttcagcctgaagaaatttatttactacttcttcaagttcaggtctgcttatgacatattctctcagtctttgtttatctaaaaatgtccttatttcatctttgtttttaaaggacagtttcatttggtacacaattgtgtttatagttttgctttcttttggaagttatttcattatcacctaccctccaatgtttcttataagaagtcagtcataatttgaatctttgtttctctatatgtaatgtattatttatctcaggctgcttttactagattcttttttaatctttgatattttttcagcacagtgataatattcccaagttggtcgtcattgtgttcttcatgcttggagtttgtaagtttcttgaaattctttttcactaaattttgtgaaattatgatattcttatctactaatttcaatatctgtgttattttctgagtctatttcttttctcttttttaatgagacagaagtttaattttctctcacataaaataggtttaatgaataggctttctgggattagaatgacaattatgaaatcagagacctacccagattattttctgaatctgtttttagtgactgttttctctcctggttaaatggcacctttttctgcttgtttgtatgtctagtaatttttttattatgtgctagacatgttggaggccacttgaatgccacttgagaatctggatttttttcctttaaagagtttgatttttgttttggcagtccactaatttgctgatggatcaccttgatcctgttgaggctcgcttttttttttttttttttttttttttgagacggagtctcgctctgtcgcccaggctggagtgcagtggcgggatctcggctcactgcaagctccgcctcccgggttcacgccattctcctgcctcagcctcccaagtagctgggactacaggcgcccgccactatgcctggctaattttttgtatttttagtagagacggggtttcaccgttttatccaggatggtctcgatctcctgacctcgtgatccgcccgcctcggcctcccaaagtgctgggattacaggcgtgagccaccgcgcccggcccgaggctcgctttttaagggtctaaagaggacttactctggaatcgagcagctctaacttatggtgtttccagggtctcaactgaattcctgggttatctgcaaggttgcttcattatttctaatagaaccctaacatcttccaacactatatggcctacataatttccattcagcttagagcactctgcaactattctttaccagaggcttgctctaaacatatatagctgattcctcagtcagactcaagaggagccagccccgacagcagcaccaaactccaaattctgtcttctctgcctatcagcagggatgctgtaactaagctccactaacctatgccatagtttgaaaagggcctttgggtagaaagccaggtggtggtgaggctcaccttgagtatgtcccttgtttcaaggatcacattcttgttctgtctgttatccagttacccaaaccaattaattcttttattataatcagttctgtgtttgtttgcagaagaccaagtacaatctcactctctgctgttgtggttaaaatcagaaacctgaactatttcttcctacttcatagaaaattccaacacgtttgtttcttagaccgcaatagatttgaggcagtaaacaaaggtgaaagatatagatattatattgatagcttgacagtaagagaagatagaacaattatacaaagcagtcataaacactagaagtgatttaatgtggaagcaaacaagcatacacatcttaatacccgagagaaactctgtcttgtcactgtgttgtgatttgcatggtgatggactttaagtcacaaagaacatcttaagtctacttaagaaagaaaggtgtaggtattgcatcttagaaattgtagagttgtgttacctaaaagcagaatcatgagattgtttaaatccagggagatttataacatggcaatacaccctgaagaggtaaatatgaatcatctagaaaagttacgtctgcaagttagttcctgatttttctgaagatattagataactggaaagttgctgtaaaaagtgttaatactgcaaatgacaaagagtaaatgggatgtctgtacttggcattgctggagcatttaggcttcctttccttgaagcccaaactttgttaccatggtgatgcttggatgccaataggtcaagagtgtatcatgtaaaagagaaggcggggaggaaggaggggagagagagagagagagtgagagagagagagagagaaacattttttatttatttgtgtgcattttctaaatcactcagtaggattgaatgccaactgcaaaacatttcagctcatttctaagaattaaccagaaaatgctttgcttctttgaacctgaaatttttattaaaccttgaatcttaatactatctacccttagaattccttcctctgcctaccctcacttctgccctgatgcaacttcctccacagtatatcaaccagcacttaggaagcacacacattgcatccatcagcattgcttctgagaagctgggccaaccccatcctccttcctcagggacaggttgtcccctatattaccgtcatggactaactttgccttcctttcagtcaatggtaatactcattaggcagagtggattcgatacatgtgtaatagcaaattctccacaagagagtttttttctccatatgttgtttttattttgactgttgattacaccagttctttcatgctattaaacgaggtttatatcctttcttcttccttttataggaaaacctgggtctattttcagcagacccaacctccaatatctggaagacttatgttaactctattgacaatttgttgctgaatggattctttcttgccattgagtgctccctcaagtatcttctggaaaatactggtacttactggcttatggatgtgggttattattggaaagataacaacagtaacatttgttgaattatattgaagagcagctgagtgctctgtgacttttcccaaaacgttgtagaccttttgtgaatgatgcacaggaaaacagaaaaggtatcgaacttctaaattgttcaaagacaaaagatttctgacgcttaaaattagataataaaccaggctgtaagacagtggtgcacatagcaaaagtataaaagtgaattcactctaaatcaagcttcagtaaagaggagtgaccacgttaagaagcaggaagcactgttagcaataaaggcagaaggcttcatccaagcttgacttatggcaatgggtgggggacattctgtgccttcaagcttcatgtattttatctctgtagacttttgagaacacaaggagattgtgtccgccaggttaaatggaagaaacagaagtttttctgagtgaaagagtcacacaagaagtaggggaggaggtaattttcagaagaaaaagaaatgtgtagaacacaatgggcattctttgaagcttttaaaaaacaattaaaggctttgaatttatagtggataaactggggtaaggtacacagagtgaaagatacagaaagggctaaccttagctagtgaatgatgaaatggacagggcagaagagttcaggactaaaagtcgaattaaaccttcacattctggcagattctgagttgcttagcaaataacctatagaaggatttgtcaaaatggtaaggcagaggtaaatagtttgaagccagaggatggaagtaagatgagagtttttaagaactcaaggattgaaatgaaatactgatgtaaaataaatagtccaaggccagtgtccagatatccagcccataaaagagactacatgcagacacctacgttgagaatccagagagaaggaaggcccagcactgagtgtagccccaatggccatccccatggtcttgataggtagaatggctgaggtgttaggcatggtctttgcttgcaggatacaggggtgctccaaactaaggaaatcaacaacaggactcaggaaatccagcatagttagcaaggtaagagatcatcttctggagcctgggagcaacaagccaatggggcatggaacacgggcaccaagtctggataactggctcttacggaccagcactggtggtgtccaccttagtgaactgaccaagcctcctctaatgctggaggttcagggggcttcatcactaagccctccctagagaatctaggaagataccccagccatacttgggtgcaggcagtgcactagaagtggtgcctaaatgacttcatccttgaccaatggctctctggttctcctgatctgggctatccgatgtgccatgtgtccacttgtgggaaggacagagtgggaccaggggatggagagaagagatggcagtctttctccaagattaccaaagtttccttcgctttgtggaaataggaggacaggggaacacattttcttcacaatatagaggcccttcgaattctccttcgaacgggtgggagctgaatttatcagctgcctgatctgaagcactatagataaaatttgaaaggcactggttatctaaggggaagtaaaggagcctaaaggggcctctgagaagaaaatcatggtgaccccttgcagtgactcagttgggtggctttgtcatcctaggtccaccttaccattttgtctggtcaaacccacaataaatgagggtaaggccctggaaaatggtaaagccacaggatggaaggaacctgtccaccaaactggaacactcaccttgcactgttaacctggaggggagtagacttctttgacctttggagtctagagcagagcaggggcttctatgacattgttgagggcattcccaaggcttgggttggtttccctgtcatctctcaacccaaaccctgcataggttatatgcttcccactccatagagaaatgtccctcctcctcttacctagtaaaatgatttacgtgcaccaacactgtggaaccaggacaatctgctttggatgataattacattggcgttacatccaatgtagagattacagtcccatgtcaacatatgggacaaaaatctcatacagtcaaaacattctgtcaagtcttttgaattccgtaaactatatgcaactttgtctattaatttataagtacataatatgtatattaatgcagaatatgtcatgagtatatatataaagcaaattataggtgattttataagctatactattttataaacatagtagtttttataaactataccatcttataaacttatagtagtataattactttgttattggtaaacttgtgttcccttaagtcaaatattgggactctcctgagtccaatcttgtgttcccttaagttaaatattgggactgtcctgagtccaataatgagaatttgtcatccctccagttctgaaggcaaggccctattcttacgtattttgagtatactgcagtattttacttagggtgagtggctaagctgtggtaacaaaaactccatcaacaatatggtttgaaggacagagaagtctacccttgaaagcaagagtcaaaggtgagtgttccagtcttatgggcaggttccttctgtcctatggctccaccattcttcagggccttgtcctcatttctggggttgaactgactcactgccatgtccaggctctagtctggtagaggagaaggagactgagtacagagaaggatcacctgcagtctcaagagtcccagcccacaagtggcaccatcatgttgtcctacatccactggtgaggaaatttcgttgccacacctgtctgcaagcaaggctgggaaatctggtcaaatcccagttattactctatttcaagggaagaagacaacgatggatttcagtgaacaggctctgccacccacagtatccagcccataacgggctcctaaatataactacaattgaaaagtcatataaaaataagtggttattgataaaaactttaaccatatatcttgtacctggaacatcttgctctgtgttgtattttgatttaaatttagcaaggcaagttgacctagtaagtaatcagggatttgttaattattcatactgtttttaaaatttttatcactacaggaccacagcaataaattatttcttagaaaaggataaggagcagaataggcagaattgtaatttctctttgtggttcatgtctgtacatcgttgacaagcctgcccctgttcacctagagtgataagtggaattgtatggcttgtgcctaggaagaaatcagctgcttccaagaaatgggctttgaaaaatcaacctcttgttggctgggcgcggtggctcatgcctgtaatctcagcactttgggaggccaaggcgggcgaatcacgaggtcaggagtttgagaccagcctggccagtgtggtgacaccctatctctactacaaatacaaaaattagccgggcatagtgtcgcatgcctgtagtcccagctacttggaaggctgtggcagaagaatctcttgaacccgggaggtggaggttgcagtgagtcaagattgtgccacttcactccagcctgggtgacagagtcagactgcatctcaaaaaaaaaaaaaaaaaaaaaacaatcaatctcttctcaaccagaggctggactgtcccccaggaggcatttgagaatgtggaaggggagtggcttgggctgatcagtcactaggatgtgctccatgaagacaaggaaagtaaatatcctgcagtacccaggagagccctgcagcagaatgggcctattcaaatgtcagtggttcccccattgagaagcactgcaagactatcaccctcacattgtatgggatgtaaacaaaattttacatttccgtttccctacagtctagcagcctatctaaagaaaagcattgctctgggtgcttttaaaacagtcctctactttgtccattttatccactctttgttttgtttgcttgttttctgtgtttttcagagtgtaaggcaggacttaccccaatatttgaagcacaactgagtctagccatcccagagctagttttctatccgtctctggagtctggagtgaaggggggtttctgtgacattgttgagggtctcatcaccagcatttttaggataccatctctggtgccacggctttccccacaaaatggctctcctcactatcaggtactggagctgcagccatcctgccctccaactgtgtcccgtccagccgaatctcgaacttcctgccacacactggtgtaacctgcctgccgttgtctcgcttccccaggtcgacctggacggtataccagatttggcaaacatgcggcgcacactcatggagagagtccagagaatgatgggcctctgctgtggctatcagagcaccttcagccagtattcgtacctctatgtggaggaccggaaggaggttctgggtcagtttctgctgtacgggcacatcctcactccggaagaaattgaagaccatgtggaagatggcatcccagagaaccctcccctcctttctcagtttaaagtgcaaatcgactcctatgaaacgctctatgaagaggtgtgcaggctggaacccatcaaggtgtttgacggctggatgaaaattgatattcgaccctttaaggcatctctgctgaatattattaagaggtggagcctcctgttcaaacagcatcttgtggaccacgtcactcacaggtacaacagttgttttcactttcttccagcatgctaggctgtgaggaacaccatgtttttaaaccttttttatattttttccccatgggtatgttggttaaattaaagattaagacagctggttagaggttctaggcttttggacaccatggtaacttaagtcctgcccttttctttgttcaccagataaggcctctttgttttgttttctgtttcatgtccagtgtgtgaaaggcacgtggttaagtggtaaggaatattagagacaataatagcagatccaagcttccttcacagctccatgcaatctctttaagcttgggaaggagagagggtctaatgggcctctttgttttacttctacctcttattccttgtcttggattatccagctgggcaatatggatgtcactaaaactctgtgctcctgactgcttgtctgtgccattctcactgtgcaacaggctggatatgaaattctgtctgtcctactgtgacctagaccacccagcccagcactaggctctctaagccagagcatcatcctctgaatgaataatccatgtagtcaacagtcccccggtcactttaccttggcctggtccccagatacccaccacaattagaatctcgacccccttctcagaatcccattggggaccaccagtccctctgcacagtgattgccctttggagtgctggatgagactgcagggaggccaacctgaccccctcctcagtttagtgctggttttgcttaatgctgccactgccttgctccctgatctggagccataggcagaaagaaaatggtaacattgagaattttatctatctacaaataaactttgagagattttccaagggtaatgttcaaccaccctaggaaaccccaagaacgctttgtggggattttttttttttttgagatgcagttttgctctttttgcctaggctggagtgcaatggcacgatctctgctcaccacaacctctgcctcctgggttcaagcgattctcctacctcagcatcctaagtagctgagattacaggcatgtgccaccacgcctgggtaattttgtacttttagtggagacagggtttctccatgttggtcaggctggtcttgaactcctgacctcaggtgatccggctgccttgacttcccaaagtgctgggattacaggtgtgagccaccgtgcctgactggggatgttttaaatagggcttcctgtgtattcttccactttcatgaaagcttttcttccctgaggaactcagaggcaagaagaggaaatgctgatgggtggtaggactgtgacagatgccccaggatggagcactgttggaggagacagctgctttgtggtccctcttcattgctacgtctggtaattcaaggataagcagcatgtttcaaaatgcatgttttattattcaggcacagcaaggctacagagcagcagatgactcccataaaaagataggttattactcacagttcccaggaggacagtttacagcagatagattattactcatagttctcaagaggacggtgtatggcatacagggccacagtggggagctccagcgtccatcaggaagcagagggggggcagagaatacaggcaggagcctttgttgtgatttctgtgggaaggaatagacaagacatggcaagcaggctcaggattggcgagtttgaacatttcagtagctctggggcatagaggctattccaaattgtctgggacctggccttgggctgattagggcagggggataatggcccagagcatgagagccccatagaggaggtggttggactctggaatagttggtttgcatatggaaagtgtgctcacgagccagccactgctgtctcaaggaattgctcagccctgtgcagggaagtccctctagagtttctaagaccccgatgtgaaaggatcaaaaacacatggttgatacaggacgtggtaacagcagctgccataggcatcaaccaggcaggctttaaagatctaatggggttggtttaacaggatgaacacacagtagagcagctaggaggcctgacttttgtgtccttggatccctgtttcctcacctctgaaagaagacagcccaactggattcttctaaggtgtcttccgtcttctagctttaacagttggtgattctagaaactggctattgtgttacactttagaagaagattttattgtattctggaggattcgataaaatagaaataataaaaaaattattattgtctcctctgtgccatgtaattatgtgatttccacctttccttaataggtcgggatgaatcccaccttatgttgcattttagatacttcattcactgccagaagtccaacccccttttattacgtaaattctcatctcattcagctcttcctgccctaatctgactcaacccctacctctgcacttgcaaagctttcctgtgcccttgcaccagacctcaggatcttacagcagcaaatgcccactgtccctttcatcttgtctcatcaccgttttgctccaactgaaacctggctcccttctgaggacactgctttccctccagccctcccaagtggaggctgacttttctcctatatccctcttaccaataggcctgcaggtgggtaaggtatggttgctcttcagtgctgcttccagaccatttcaccaccatcttccctcaaaatcaccagctctgctgacgtgaattctcagacaataccaactgcactctgccttgctgccattagtccctcttgctcaccagtgcagatcttagcgtctggctcagaggtttcccttcccacccttcccactttctgctgatagtcacccgccatgacccagcatccacagaatttccatcacactggctcttacatcgttgacctcctccctccaacgcccttcactctaccatacctctgctacctacatctcttctgcattctcagtggggctcagagaatgatggggaagtaattgctctgccttcagaagctcaggttgaagcattccactccctggcctccacctgttatctttccacctcacttacttggcaacactgctgcacagaattcttcaaacccatcaggatttccaattcactgactcccctgctttctcagagtctatcatccttggtccctgttccctcccattccctcccattcccaccttgtaaaaccctgactgtttaaactcagtgctccacacctgctcctgagcaattcatccctgatgaagcaaaatcaaaccagtcttctgaccagtcctacatttcatttgtgaacataaaattcaggtaggcccttcacattttcctagacacttcccaattctttcagactcctgtttccttcaaatattttctctgcctttatgactctgcctctcatttcactgagaaattagtatcaatcatgagagaactaattcaccttttcaccaacaaatctaccaacatgcctgcatttgaagctggatattcaaccacctctcccatgactgtggataagctgtccttgcttttctaaatccagtctctttcctctcaccttaggacttaccttcttaaatattccctatctccaacattatcaattctttcctttacacattcttagtagcatgtgggcatattgtcatatttgccacattgaaaaagagaaaggagtatgaccccacaagcccttccagctacaacacaattttttgtatgcactcctttacagcaaaatttctcaaaagatgtgtttatatttgttttttttttttttttggtttttcacctcccattctctctctacaaaaagttttatgatgaaatataacatacatacaatttagagaacaatattaaagagaatatgtgaatttgcatcatccagctaagaaacagaacattggctatattttaaagtttaaatccttctccctccttgcaagatgttactagggtcctaaatgtgacataatccttcccaggcttttcttcatcactttgtgtatgtgtgtatgtatatggatatatacacatgtgtatgcatatggatgtatacatatgtatatgcatacatacatacctatgtggagatgtgcattaaaacttcataaaaatgatattattgtatgccatatatttttctgtgttctatttctttcactcagcattatgtttgagatttatccaggttgacagtataacagtagttcattttccctgtcgtacagtattcccttagattaatgtaccacaatgtatctgtccattccatagttgttgaacatttgggttgtttccagtggttttgctcttccctaaggacactgcttcccttttaacaatgttgctgtaagaactcttatatgtgatcatggaatgggcaagcattcctctagggtgtatacttaagagcggaattgctaagtcaaagagtatgcatataatgccaagctccttccaaggtagagacagccatgggtgaaagctcttacagcctagcatcctccccacctcttagtattgataaattgttcaatcctggccactctggtgggagtgtaatggtatctcactgtggtaaatattttgcactactctgagtataaaaaggtcctcatctttttatgtttttggtgagtcattatgtttccttttctctgcctattcatatctgtggctcatttttctactggacttttttttcctttttgaaattatgattaggaattacttacattttctatatctagtcctttgctattgtatgtcttgcaaatggagtctaccattttgtgacctgtcttttcactccacttatggtgtattctgataaacaaattcttaatttgtgtggccaaatgtgtccaacttttcccttatgttgttcttcttttgtcttgttaaataaatccattttttgccctgatatcctaatgataccctcctgtattctcttctaaaagttttaaaattttatctttcacattaaatagtcccttatctagcactcatgaatatgaagaaatcctaattactgtagcttagtaacaaatctctatatctggcagggcaggtctccacctggatcattttcatcaagaatatcttgacagttcttggtccttaccatttcatataaattttagtcatcagtttgtagaagaaaaaaatcttttaggattttaattatatttgtagtgactatagatcaatttgagtagaattgatgatattgaatattcttgtccaagaacatgttgtctctttgcttatttacatcctttttatgtctttcggtgaaattttgtaatcattgtctttaaaaattttgcatatttttgttcaaatatattcctcagtattttgtttttcagttcgtagtataaataatattttaaaatcatattttctgtagaaattgaattgattttgtacattgatttcatatcacgcaatcctgctaaattaatttaataattttgataattcatctgtacattctttggtgtttgcaacgtacatggtcatcatctactaatttatgatagttttatttcttcttccttctcggtctttatgctttatatctctgtctcttatcttaccactctggctaggacttccagtagaatgttgaatgaaagtggggataacatacgtctttgtcttgtctctgatcttaaaaggagtgcttttaacatttcactgctgagtataatatttgctgtgagttttctgtggatttgctttatctgattttaaaatttcccttctatttctaatttgttaggagtatttagcataaatggatgtaaaattgtatcaagtgttttatctatgtccattaagataattctggtttttccctcaagatgttaaagtggtgaacatattatttggcttctaatgttaaaacaacctagcatctgagatatgcccaacaaaaagtattatctttttcaatatactctctggcttattgtgtttgcaaatattttgtttagcattactgcacctgtttgtgattgaatttggccttcaattttcttttttttttcctgtctgtatctggtttttggttttgtaattgtgctagcttcatagaacaagaagtaattcttcttattttttctccagaagagttggtgtaatcttgaaattttctgatctgtgagagtttgatttaaatttcttattgagccatctgggattgtgattttctttgtaagaagattttagcctataatttctttaatgattatgaagatattgaagttttctattccttcgtaagtcacttttagtaagtcatattttctaggaatgtatccatctcatgtaaatcttcaaattattattataaaatggataagatcctctcaactgtttaatctctgcaaagcctatggtgtctccctcttttcatttctgttcttttttttttttttttttttttttgagacggagtttcactcttgatgcccaggccgcagtgcaatggcacgatctcggctcactgcaacctccacctcccgggttcaagtgattcttctgcctcagcctcccaagtagctgggattacaggcatgcaccaccatgcctggctaattttgtattttttagtagagacagggtttctccatgttggtcatgctggtctcgaactcctgaccccaggtgatccacctgccttggcctcccaaagtgctgggattacaggcatgagccactgcacctggccttctattcattcttatttgtgctttctggtttcctttcttcttgccggacacaaaaaaactatctaataaactcattgatcttatttattatggttttatttttatttcaataatttattcttttattatttcctttactactttggatttattttctgttctttggctaacgtttgcttgttaattttgagtcttttgtctgtttgcatgctaacattgaaagttataaattctcttctaaatacagttttacctccatcttgcattttagtatgtaatattctcattacaatttagttctaaatacttttaatattaattataatgggtttagattttttaatttttcaaatgtgagacttttctagttatagttttttattaatttccaacttaattgtgctgtggtttagaaatgatatgtctaataacaagcttctgaaatttgttaaagtttgccttattcaatatagtatattcagttcttataaatttctgggcatatttgaaaataatgtatattctgtaagtactgagtagaatgttctatgtatgcctattgttcaagtttgttaattattctattcaaatctactgtatcttcactgcctttttttaatctacttaatctatcatcacttactaagataattgtattaaaaatcttccatttttagtggtatattgtcaatttctccttgtaattctgtaaatttttgcttcatatattttaaggttatgttataggcatacagattttgactttttatatcttcttggaacattgagccttttaaccaaacattaaacatcttctttatcactagcaatatgtcttgtactaaagtatgttttgtcttctattaatgtagctaaaacaatttttctttggtgacatttgcttagtgcatctcttcttatcctttggctttcaaccttgctgtgcccttccattagaagacatttttataatgagcatagaactgattttttaaatccactttagcaatatgtattttttaactggagggttttgttcattaacattgatcgtggtacattttaatttaaatctaccattttattatgttcttttagtttgctattctttttctttttcattgacttccttttttgtctgctttggggtataatttttcatgttttcttttattttccttattccattttttcctctgctactttgaatgtcatgccatgtagctctgctgttctaatgcttaccactgctattttaataagcatccttaaaataagtaaatttattactatttttagtctcttcacaatgattaaaagactttagaatagtttcatgtctcctgttcatccatcaaattatattctatcattcctagtaatttagattgctctctattatttatttaagccccaggaactatatatatatatctatatatacaccaaatgtttatttattatttatttattttatttttttattttttgagatgcagtctcgctctgtcgcccaggctggagtgcagtggcatgatctcaactcactgcaacctctctgcctcccggattcaagtgattcttctgcctcagcatcccgagtagctgggactacaggcacaggccaccatgcctggctagtttttgtatttttagtagagacagggtttcatcatgttgaccaggctggtcttgaactcctgaccttgtgatctatccgcctcggcctcctatttagatttaccaacatacttaccattattgctctatagtccagacatctgactgaggtatatcccattagaagttcctttagtaaaggtctattgatgaagtgttctcattctttctttgtctgaaatgtattcattttgcccttgttctttaaaaatagttttgtggaggggagaattcaagaataacataaattctctttgattattgaaaatattattctactgtgtcctggcttccatttgtgttgccgagtagtcggttatcagtctagttttgtttttgttgtatgtgtgctgtcgttgttttaagaaacttgtctttgctctgaagctaattttaagattttttttttcttttggtaatctgtagtttcatagtgaagtgtttatatgagggttcctttatatttattctgcttgggatttgttgggctttcttgatcttacattgcgtgtctttcagcaattctagaaaatgtttagctagactcttctcaaatgttgctcttgtttgttctatttcgttcttctggcacttttgttatacttatgtgtgatgttttcattgtctcctgtcttttaataacttgcatatttttccttttttctctttctaccctgcagtttagaaactgctccacgtatatcatacagcagtctaatcccttttcagctttgttgaaatttaaattataattatattttccatttttagatcttctactcagttattgtataattttgcttgcttgtttttgttctttgttatttttcacattttaagccttctcttttattgttttaaaatatgtttattagagtataatcttaagacagtttttgatttgtcaacttaaaaatgtttgtttcttcctgccatatagtaaagtgatataaaggcctactgaaaattatgagcttctttctcctggaattctccatcaacatatgatcatttatgcattgccagcaaacacctcttggaagctttttctatgcttcttttcacaaagcaatgctatcgcaagccataattctcatgttatccagttcataaattttgccacttctctgaatccagcattcaatacaaaggtctgcacctatcacagattttgagtgcgctcagagaacctctgaaatgacctccattcttgattctatccaaatcacacattacatttagatgtcgtgtctcctcctgagtctccttcatcacaagataggcctcagtctttgccattcgtaaccttaacaccttgtgcaagaggccatattcttaacatcagagcatagtctatgcagagtgcttagtcaagtgttgggcatgtggtaggattttcataatgatagatatttttgttggggaaatcaatacatctgcctttcgagaagtagaacgagaatggttcctcatgttctgtttgtgttgattagcttggccaacctggatgcgtttataaagaagagtgagagcggcttactcaagaaagttgaaaaaggagatttccaaggcttggttgagatcatgggacaccttatggctgttaaagaacggcagagtaacactgatgagatgtttgagcccttaaagcagactattgaattgctgaagacctatgaacaagaattgccagaaacagtgtttaagcagctggaggtcagtgcatttatgtcttccttataaaagaaatagaggaaacattttaggatttcagaatggggtaaagtggggtacagcaaatgaaaaacagggcttggagctgcaagatccgtgttttggaactataatgtgtagcgtatttgtaacatctagcaaattctggaaactcagtacatatgggagaaggcaatgctggagatagatgggagaattaagatggataatttttctccatagaaatgaaccaatgttttggttgagaaaaaaaaaaagcagatctgaaatatgttaagatggtccaagaggtaatgtgggacataaaagaaaataaccaagcaaccctgaagaatatagaaaagggaaggggttaatgtagcttcagtagaaatatggtagaagcaatagaaaccgaagattgtagaaacatcttcctttaagaaaaatctaaaagtctctttagcattccaagttttcacaaatttagagggcttagaggaccagaggttgagagcaagaaggttagtgtagagtgagtggtaggtaatagttgagagcagctgcggaaggaagtcgaggaagagtgggtggagggcagattgtagggaatgggaagatgacaccaccacaccattgtaccatcttgtagcacagatggaagcatctgggctctgtccagctcaggactatgggagaggaaagagcaccttgggaatctgaccacactgaggtttcctttgcaggagctgcctgagaaatggaacaacataaaaaaggtggccattactgtgaagcagcaggtggccccactgcaggcaaatgaagtgacactcctccgccagaggtgcacagccttcgatgcagaacagcagcaattctgggagcaattccacaaagaagccccgttcaggtatgggccgaacactgctgcctctctttctgtgaacactgcagtctttgagtcatggataatctttttgtggggcgtgtgtattcttccagcagctgcagaccagttaataatcttccttcccatttaggacctttggttgaaacgtggtgctaatgtggactgaatcctatcatgacctgtatgaaaaggccaaggattgtacaaacatcttgccttaaaaagatgcatatatatctagaagcatctttgtgcctccaagtttataaagggatgataggtggtataattactaggattttactaaacctttagcattctaagttctcacagactgttcttttggttttaaaaagtggctgattgaatttttaaaattttacagagcatttcattttggcagcataaaggaaggatttaggtgaaggttttcttcagggggtttctctctgcttggttccaacacctccctgcttgttatgacaggtctttacataaacaaagcaactctaggatcagcaacaccattcatccatgcccacgctgcacatacttgggctcctttctcagggatttcctcccgtggtgaagcggtctgcttctggtccactgctcagcatcaacggctccaaccaggaggccaagctggagctcaatggtcctacatctgctgatgtgccagctagattgggtgccctttgccctaacgctccagctctgtgatttgtttcctgtttccttgagcttcctttcttgctgggtctcctctatattgttgggtagacagacttcaaaatctccaaactggaaaattctcgatgcttacagtgaggaatgtttttattttcaaaggttatttgcccacagaaatattaaagcaacaaaccaaacaaaaaaaaatacaacttcactggaacgaagttcaataaaaattaagtgcacagatgctagattcaggtggcctggggtctaatttcaggtcttctacttacttcttatgttatgacaaagttacttaatacctttgtgctccagattcctcatctataaaatgtagatgatagtagtgtccaccacatatagttgtgggttgaattaaagagatcattcttgaaagtgtgtagcactgtgtctggtactatggtgaaaaactgtactggtttgtccaggatcgttctggttgttgtctgggagttttaaaatctctccaggtgattctaaatgtgcagcccaaatggcagcacattgctttagagtcataggttttatatatttatatcttatgtctgttttacacacttgtccttccctgtctcttaacatactcatcttactctctgtaactccaagcataatgcttgggagatagcagcattttcgaggtagcgtcttgctctgtcacccaggctggagtgcagcatcataatcatagcctactgcacccttgaactccttgggttcaagcaatcctctcacctcagcctcctgagtagctgggactacaagcatgctcatgtcttaggaagcacctgtgttctgggcaaactggatggttgctcactcagcctggcatacctatttttatcattcattcttcaaacatttattaagcagctgctatctcccaagcattatacttggggtaacagagaataagatgagtaggttaagaggcggggaaggacaagtgtgtaaaacagacataagatataaatatataaaacatatgactctaaagcaatgtgctgccagttgggctgcacatttagaatcacctggagagattttaaaactcccaatatgcccagtgtgtcctatatactaatgaagttagactttctggaggcgagacctgtgaatcagtattttgtaagctccaggaattccaatgtgcagccaagtttggaaaccaccaccctaaagggaagtaattggtttcctttcaagcaatcatgaggaggaatgtaactcctaagtctgtatccctttagaataattgccttaggagccacgcccttgttccaaagaatcatctgttgctcaaaacccttgtagactcctttggggactatctttcagagtctgaggcttattcttctgactcttttttgggcatgcaattgaatttttgaaattgaacaccaattcagagccaaaactgctgaaggaggtaagttctccagctaggtaatactacttagtgttaacaacaaccactccaaaggcaacagccataaaaataaagacactaatatttttgcaccaacagtctctctctttttgttttgttttgttttgttttgagacagagtctaactctgtcacccagcctggagtgcaatggcacgatctcggctcactgcaacctccgcctcctggattcaagtgattttccttcctcagcctcctgagtagctggggttacaggtgcccaccaccatgcctggctaatttttgtatttttagtagaggcagggtttcaccatgttggtcagactggtcccgaactcctgacctcgtgatcctcccaccttggcctcccaaagtgctgggattacaggcatgaaccaccacgcccggcccaacagtctcttaagataatttcaaaaaagaaaaaaattcaaagatgttggggaaaatatcctcccaaagagacttctaagactgcttgaaagggaaacaacattggtgtgcttttgtgtctgttcgaaattcggtattcctccttcatgggtatattttgtgtattgatcaactcctgtttgttttttcattttatttttatttgatagttgtgttcgtttttctttctttgcacttgtatctgctggctgtgaggatactgctactcttagctgggtgttccaaattcacatctgctaatttgacatgcagatgaatccctggaagaggatgctttgaaaagaactgctgggaaaccaaacatttctgcaattttggtgtatttctcttcttgtcaagaaaaacatcagagctaaaatggaattgtagatttatcactaaagcgaatcttagtggatgtcaacttatgtgttttgttttctttcttagtttggtgtgtgtgagtgttcaaaatttgtaggtattatgtgtggcatgtgagtttaaatctggtttctccactgttaagttatttatgaatttctaagttgcaggccctggtatatttttctgtgaattcaagtttgagtttaattctggtttcttcacttttagatcatttataaatttctaaagtgcagaccctggtacatttctctgtggatgcaagtttctgctcctgattaggttacacagattaagctcagttttgaatgttctcgtgtttgaggagagaaaaaaaacctgagtgtcttattaagcccttgcagtctgacaggtgctgtgtgaagtcaggttgcataggttgaggttcttcatgtccaagtcaaatttcagctcctcctttagttcttaactctaaattataacaccatatttcggtgagagccgagctctcaccacagtaattggctaaatcatcttactcagattcaagggctttgtgcaactcttaaagctggtgaccagttctccctcttgaatgaaaggaatgcccccatgctctagtggtgtttcactgtttggtcttcctgaccttgagcacagtcctcttgaccttaagaaacgtcaccatgacatatagtcttcttgcccacaccaagaccaaggtaatcgagggattactgagccaaaataatctacctctgtgagctccagctcaatgaagaccattcgtgttttcagcaggcgaccagattctatgaatggctgggagggctttcttgaagatatcttccatggggtgctgtcctacatgacaactagagaaaacagctttccaaatagcccaaggcagcagtcatgaggaaagaagggcttttgaccttcttgcacagtgtctgctgtctcttccataactgcagaaaagggcaatatttgtcattaaacctcccagagacatatcggtttcctaagatatgtcattcattcagcttgatcctgttcttccagttaacctgactcattcacaggatttaggctttcatggagtagatgaggttatggtctcagcagtggagccagcaaaaaaggatgtagctgttaggattttgagataatacacctttcctgacctcaaggacttatagcctcagggacaatttcaaaaatgagcaataaggcatgcacattgggcaccagctttaaccccgcccagggaggcagttcacacctcccctagaacatggtgcttatcatggtgagccagagccagtggcaagtaagagctgtttcagggggaaaaaaaacagttacaaaatgaggatattctgggcaaaggaaatagcacatacgaagatgcagaaggatgaaaatgtaagaaacagctggaaaactgcatgtgtgtatggctgggatgcaggaagcaggagaggagaatggagggggccatgttttgaccataatctcagccactgaggagtctaagtatgacaaaaacataatgtaaagaccaccttctcatggctgcagagaacagaatggggcaaggtaggctcaaaaccaggtgctcaatgggagagtggttccaacagcccagatgagaagtggtgaggcctgatcagaagcagtggcagagatgagggagaggggaaaatagattacagagagatttaggagaatatctgcaggattgattgaatgtgggagatggaggagaaggagagtgtaaggggatttttcatcttctagcttggacaagtggtcggaagagcttttatcccactgttcactgaggcgggcacagaattggaaggactgcgcctcacaaagtcagggttggatacattaatttttttttttttttttttttgagacggagtctcgctctgtcacccaggctggagtgcagtgacaggatctcagctcactgcaatctccgtctcccgggttcaagtgattctcctgcttcagcctcccgagtagctgggactataggtgcatgccaccatgcctggctaattttttgtatttttagtagagacagggtttcaccttgttagccaggatggtctcgatttcctgacctcatgatccacccgcctcggcctccaaaagtgctgggattacaggcatgagacacgttgagttttatgctacctggtgggtatcaaggacaggtatgacaccgttcatggtatacacagatacagacggtactgagattcccatttaccaacaggcaatttcccaggaatcaatttagctcacttattcctctctctctaggctcacatctgggtcaggcctgaatcagtcatttttccacgatcaaatgcatgagcgccgtattttcatttcttttaattatagttttattcatccaagctttccaggcatttctcttttagagtaaaatacattttgccttattatttcaacttcaaagactcaacccacccttttccctcctattgctttcttgttcttatactgtatcatttccccagagtttagaggatggcttccagctttttaggcacgtggacgaggtctatgaatatcctgacaatttgctgtaaaggtttgaaatcataagaaggctacacatctatgggttcccttcacaacttaggccaagttggtttttatgtgtgcttagctacagaaaatgatcacccacaaatctaaactataaacaaaaattatgccgcagggtggatgaagtttggaataagtttgataaacattcacctcttataaatacttgaggaaccaacatcgatttaagaatgcttatgggtgccaaaggaagaatggttagcaagataatttctaatcttccatgtgcaccccaaatagctcctatcttacctaaaaagttattcctaaatggtgttccactaacaaattaaacagcatgtgggcttttagaatttgcttgaattttaactaacatcaagaggttcagttcacattctaagttcactctagtcaagataaaaagtggaacctacacacaccaacgattagtctttggaaatgaagaataaacacaagaactcctcacccttggtgatcttttttgctgggccccttgccatgagcaccttccatttctttcctcctagttctttcttcctcataagggagaaagctcctctctctatatatatgtagagagacagggcccttttcaactctgagcactctgaccttctgttctgaaatatgtgggagctaaataatagagaaggcatgcaaatgatagtcccattctcttaagatgtaaatctacaaccatagcacctgagccaaaaacaatttagattgaacaagcaggattcaaacataacgagcgtcgaagttaatctgacactaatttaatagtatgcataactgttattctgttgcatggcaattaggcttaagtggtaagcattcgggtaaatgacttcaattaggattactttccatctgtcaagtcaaatatttctaaagtcaacagagaaagggcagttgaaaaacaagagtttgtatgtcattttcttcctttttcactccttttgtattctacctaccaacacgcaaacacatgcatgtacacacagaaacacacacacactgttgatgggaggaaacggccgattctctagttagtcatttcctcacaaccttccctttgatggtgaaccccatgatgacgtgttttgattttagcaaaacataccattctcccttaagctgtggtgtgtctagtatgtagccctccaagcacacagaagcaagaaaacctgagcttgaggatgagagtgagtataataaagtggggttggaggagaaaatgagagggtccttgaacactagggctatgagtgcccttgaccataaaaaagccatctgcagccgagcgggatggctcatgcctatggtcccagcactttgggaggctgaggcaggtggatcatgaggtcaggagatggagaccatcctggccaacatagtgaaaccctgtatctactaaaatacaaaaaattagccagtcttggtggtgtgtgcctgtagtcctagctactcaggaggctgaggcaggggaatcacttgaacccgggaggcggagattgcagtaagccaaaaaaaaaaaaaaaaaagaaaaagccatctgcctacatgggttcctttgcatgtagggtcttatgttggggaaaacactatgcaggaacgcatgctttgctgtatggcagcctaaagtctgtccagacttacgaggattagaagcagtttcaggtgcttgcatgccataaacactggagagaagaggatgaggaaatgtgaactaaaaagctagaaatggtgctcataggtgtcgagtgcaagcccagagactgccccaggatgcagaagggagtggcccagggaagggcaaaggcagaactggaagatcagggacagcttggagaggaactcatgaagatgaggagccagattcaaggcacacagtgaaggaaagtgaccacgattatctatcaagggctttgcagccagtcttcatggccactcacagtggttcaccagcatgaagtgctgttgcctgaagctgatgcaggcaccagtgtgagcttcaccatgaatgatgacaccatcctggcaaatggaaatcacctgtggagtgcatctgggtcccgcccccagtggttctgatttagttggtctatagagcagtctgggcatggggatcttacaaagctttcagaagatcatgacatgcagcccaggctgatagccactgccccagagtgatcaatggagggagggtcaaggttgggctcctgagtcccagctctcccacttaaagatcacctaccaagccaggcttggtggcttgtgcctgtaatcccagcacttttggaggccaaggcgggtggatcacgaggtcaggagttcaagaccagcctggccgacatggtgaaaccccgtctctactaaaaacacaaaaattagccaggcatggtggcaggtgtctgtattcccagctacttgggaggctgaggcagagaattgcttgaacccgggaggcagagtttgcagtgagccgagatcacgccactgcactccagcctgggcaacagagcgagactctgtctcaaaaaaaaaataaaaataaaaaataaatttaagaaatcacctatcactaggttcctggcaaggcccttggctttccggcttctgctgtaatatgacagtgctcttttgtgtcaaatggtcttcagaaccaacagctagatgaagggcagagtctaaaggggcttggataagggggtattcccttctagacctgagtggagaacatccaagcataatgttcttgaattgcccttcttccaatgcccactccaccccagtctgtcctgagtgtgtttttttttttttcccaaaagaaaatcctgggaagaaaagacattatttgctttcgtgaaaagaatgtttttggtgaaagccactgctctttcctaaaacaccaagcatttaaatatttcagctggttgctaccttagagatgctaggagatgggcccctgcgtgccatacttacaaaggaacacactgtgttttgtaggtttgatagcatccaccctcatcaaatgctggatgccaggcacatcgagatccagcagatggaatccactatggcctccatttctgagtctgccagcttatttgaagtcaatgtccctgactataagcagctgaggcagtgcaggaaggaggtctgccagctgaaggagctctgggacaccattggaatggtgacctccagcatccatgcctgggagaccacaccctggaggaatatcaacgtggaagccatggagttggagtgcaaacagtttgcccggcatatccgaaacctggacaaggaggtcagggcctgggatgcattcacaggcctggaaagcactgtgtggaacacgctgagctccctgagggcagtagctgagctgcagaatccagccatccgggagcggcactggaggcagctgatgcaggccaccggtgtgagcttcactatggaccaggacaccaccctagcgcacctgctgcagctccagctgcaccactatgaggatgaggtccggggcattgtggacaaagctgcaaaagagatgggtatggagaaaaccttaaaggagctgcagactacctgggctggcatggaattccagtatgagccccacccacggaccaatgtccccctcctgtgctctgatgaggacctcatagaggttctggaggataatcaagttcaacttcagaacctggtgatgtccaagtatgttgctttcttcttggaggaggtgtcgggctggcagaagaagctgtccacagtggacgctgtcatctctatctggtttgaagtgcagcgaacatggactcacctggaaagcatattcactggatctgaagatattcgggcacagctaccccaggtacctgctaaggaaatctagaatctctctattctctgatccagggtgaagggaaggtcacccagttcctgcattgtctaggctctttccttttctgcctccttgctttgactttacttaaaggcacttcccacagatgctcaccttacctgccaccaaaagttaggcagaggaaaagagggacagtgaaatgcacaccaatcagtttgtccttcaatgggtaggaaaaagaaaggaaaacctcattcagaaaaaaaaaaatgtatatataagaaagattaaaaaaaaatactggctactgcagtttggaatgaggtcctcacaggttgcttcttggatcgttaaaattcaagtgtccactgaaagcgagtctcgtttccaggcaaattcaagttccttctcagcagcatgccattctataaaccgctgacctgtgccagcgctccaactaccagctgtcagctaaacaccaaacaatggattcccctaaaatatgtgttcttctcattattaccttccctgtgtttgattgccccttctaattagttctaattaatgtgccattaacttacccctctctcagtggactctgattcatttttaaattttttctttaggcttcctctatattctttcagtacagcaagttctttgcttacaaattagcttgattccaaaatgtcacgggctgtccaggctttggttagaaattaaagcacgttctgcccaaacatagttttcctgctaatcccaaaaagcatatttagtgtaatactatagattaaaggttgtatatttgcagtgaaaagtaatagaaaacaattctgtatggcagttgtcattaagtcaaattgaataagccagattttattcatctcaaatgccagtgattgaagcagacaaggcttaattaaaagggggccgggacagaggtggagattcttgcagaaactttaagggagatgtttgagaacttttaattaaaaatattgaagagttagtatcattaacctctacacagtgccacaggtttgtgtataaaatatgtaaacacatttactttccctgtaataacaatgaaacagaaacaatttgaaaacgtaataaaatcagccaggctctaacaccctaactggtaactatattcattcattatgaatttctcccaactttggttcatgtatatacatatttttacataattgctctcagtgtaattataattttctattcaacttttttcatttgaacatttatgccagatatttcagatacttctgcaaccttgatacttttttatttttaattggagcaaaatatcccattgaggaatcataatttactttgccctcttgtgtttttttgtttgtttttgtttttgttttgagacggagtcttgctctgtcacccaggctggagtgtagtggtgcgatctcggctcactgcaacctctgcctcctgggttcaagtgatcctcctgcctcagcctcctgagtagctgggattacagatgagtgccaccacgcccagctaatttttgtatttttagtagagacgaggtttcaccatgttggccaggctggtctcgaactcctgacctcgtgatctgcccgcctcagcctcccaaagtgctggattacaggcttgagccactgtgcccagcctaccctcttgtttttaggtcttcttgggcaaggggcaggatcacagagggaaggaatggcaggcctgggcttgagtcctcattctctcacttgcagctgtgggaccttgggcaggacacttaacctctcaatgccttggtttccctgtgtgtaaactgggactaatactagtatctattccagagtcttcattaaaacaattcacatggcacataccattatgattgttgttatgtaataataataccacaagctctaccacctcaccaggtgccatgtatttggctgaagctaattgcatatattagtctgtcaatcatttcaatgatactgtgagtgtgtatgtctgggaaaaatgttgacaacggattacttttgacatcaaaggagtatatttgctgagggaaaattcattttggttatataaacttttgcaggggtccagaaagaacgttagatccactatctacttacgaatcaagtgttgtatacctggggcttgggatggtctctgagacctcttcagggagtcctcaaggtcaaaattatcttaataatcacattaagatgttatccgccttttttttttctctcattcttccatgagtgtacagtggggttctccagaggtcagatgacatgtgatatcataataaattgatacagaagcagttttctgttaagtcagatattgtagagatttgacaaaaagtgaaatgatgccccattttcaactgttatttttggttttggaaaatatacttaagtattttatttatgctgacataatgggtttattattgttacttttgttattgtcgttgagatggagtctcgctttgtcacccaggctggagtgcagtggcacggtctcggctcaatacaacctccgcctcccggtttcgagcgattctcctgcctcagcctcctgagtagctgagatgacaggcacacaccaccatgaccggctttttttttttttttttgtatctttagtagagacggggtttcaccatgttggtcaggctggtctcaaactcctgaccttgtgatccacccgcctctgcctcccaaagtgctgggattacaggtgtgagccaccgcgcccagcttattattgctacttttaaaatgccctttttttttttttttttttttttttgagacaaagtctccctctgtcgtccaggctggagtacagtggcacgatcttggctctctgcaaccgcaccctccaccctccaggttcaagcgattgtcatgcctcagcctcccgagtagtagctgagattacaggcctgcaccaccaagcccagcccagctaatttttctatttttagttgagacagggtttcaccatgttggccaggctggtctcaaactcctggcctcaaaccatccgcccgcgtcagcctccgaaagtgctgggattacaggtgtgagccacggcgcccggtctaaatgcattaatgaatattttagaaatttctttttaaaaaagctttagcctctggtacagaaaatattgaaagatatgatagatagtacctacataaacaaaagctctttggactcctaaacaatttttgaaaatgtaaatgggttctaagctgaatgcagcttaaactaagggtgtttccttcgttgagtctattctctgtatttgacaacccaggaacaagtttctgcttctaactggctccatggagggagcttctaggaactgagtggagtggtggttaattgcttccacatttttatttgcaggattctaaaaggtttgaaggcatcgacattgactttaaagagctagcttatgatgcccagaaaattccaaatgtagtgcaaaccaccaacaagccaggcctgtatgaaaagctggaggatattcagggcaggtgagggtccgcccattaccccttctctaataagaaggcatcatttccttttccccatcgtctctgagaccagtgggcagaagtgagtatgggtgccttgcatgtccctttctttgcctgtgtgtttgggtagcatggggcattattagaggtgttgacgccaaggtagacacatccatgtatatctttgcaaatatctctaagtgtttcttgtgctaatgcatatgttccgtctattgcatatacatacatttaagtaatgtatgtgtatccatgggtctagacattcttaactgggaaattctatgttctgtgccctcagattgtgcctgtgtgagaaggccctggcagagtacctcgacaccaagaggcttgccttcccgcggttttactttctctcctcctccgatctgttagacatcctttccaacggcacagctccacaacaggtaagctggaggagcatctgcagaaaggtctaggagggctgaggggtgcccagcaggaggcagtttctggctccccatcatgcctcttctctctggcaggttctgtacttcagacctgtctgtgttgcccccagcatcatcacatacctcggagctttcttgctttcttgctttcttgctttcttgctttcttgctttctcgctttctcgctttctcgctttctcgctttctcgctttctcgctttctcgctttctctctctctctctctctctctctctttctctttctttctttctttctttccttccttccttccttccttccttccttctttctttctttctttctttctttctttctttctttctttctttctttctttctttctttccttccttccttccttccttccttccttccttctttctttctttctttctttctttctttctttctttcagatggattcttgctctgtcgcccagactggagtcagtggcacgatcttggctcactgcaacctccgcctcctgggttcaagccatccccctgcctcagcctcccgcgtagctgggaccacaggtgcatgccaccatgccgactgattttttttgtattttagtagagacggggtttcaccatgttggccagggtggtcttgatctcctgacctcgtgatctgcccatctcagcctcccaaagtgctgggattacaactgtgagccactgcacccggccacctcggagctttcttaatccccatcagtattgctgctcagcatgccctctggcccatcagaggctaatctctaacaaagaactgagaaactttgaggatggcaaaggtggaaggagttgaggcttggcagagaatgccttcaatctgattctgaagaaagatccaggaaatactggccaaactcgatagctaaaatttctatagggagataagattggaagttatgttaactgaatatggaggtaaggcttattggcaaaagcatatatgagaagcccaaaatgtggggttctggcttctggttctagacagttactagccatagagtcttggacatgtgacttcttagcaacaaactttccttatctgtaaaacagaagaaacctgctgtgttcgaaggttttttgagtattaaagtaactaattgaagcagtgttggtatttggagctacagacactggttctgaaatttgggagtgcatcagaatcacttggaaggcttgtcgaagtacagattcctcggtcccactcccactgtttctgattcactacgtctgggtagagctggagaatttgcatttctaagaattttcccaatatgctgctggtctagggactacactatgagaacttctgctctcaacattgtctgggtctcaaaatgcttggatgagttctttttcctcatgtgattttgttattcatttaaagaatagttgggctcatttgcttctttttgctttcagttttagggtttttcccatacatgtttatttgattgtttgaatatgtatgacactgataggattccaaaagtcaaactatgcaaaaagatatgtatatactcagagatgtatccttgcctcctctgttcctttcatgccataaccacgtctgttccacccactataggtaaccaatttcattaatttctgggttagctttcctatgtctatctttacaaaaataagcaaatgcacatttacattcatgcatgtacagtttctaatttccccttctttcatacacaaaaggtagcatgctacgcctacctgtttgcactttgcttttttctacttagctacatagcttggaaatcactccatatcaagtcaaagatatctccctcattttttaatatttgcatcatactccatggattgatataccacagtttggccataggttatttattatattttgtaattacaaagaatgtggcattgaataaccttggactttgtattgttggccatctgtcttccaggtaaactcctaaaagtgagattcccggctcaaagggtggatacatatgtagtcttgttagatattgccaagtttccacccttttgcttcaccacaagcagcagacaagagcttctcaaacagagccaaaggatgaaaacatgcataagttgttttgtctttgacctaccctttctaacttagtgaaattaggttttgatttgttgataagaagcaagtactaaagagagattatccctgatagttatagcagttctttttttcctatagatgaaaatatttccaaagtagtccaggtgtggtggtgttgaaatatttattattaatgcattagcattctgtattataactgtatttttattcattctgtgttcagatcactgccagatttttttatatctcattctttttaaaaattaattaatttttttttaaggttggatcttgctctgtcacccaggctggagtgcagtggcatgatcatagctcactgcagcctcaaactcttgtgctcaagggtcctcccacctcaggctccagagtagctggaactacaggcatgagccaccacacccagctaattttttaaaattctttgtagagacggggtcttgctgattttgaactcctggcttcaagtgatcctcccgtcttggcctcccacagtgttgggattataggcatgagccaccagaataggcctcattcttaaatatttattttgattcatttcttatttgagtacatttttgagtattccccacaccctaagaggtgaagcatggtggaatacatcctaattccttctatatctgtgactctgtcatttcacatgtgagcaagtgaatggttagggttagaattcatgagtcacagtgatcacctctcaatccatgcagatatcactctgctgtttgttgttacaaagaagtcatctgaggcctgcctgctttaaaaaaaatttctagatagcctaatttctttctatctaggtccctatagagaataaaatttaaattaatttctaaaaatttgtatgcttatatacttgttttgttaatttatccctaaaacatgatgagattttgtcctatctgaaaacgagtgcttttatgatcttgaaaaagtcttcttctagcatgtttttaaataatacatctatcccatttatctgtatattttttcattcaggtttatcatacttccgtaagctgagattccactttatacatgctatatacattaccttctctttcatcgtatttttatctcttagtcctcttccttggcatttatcagtaagtttctcaagctcttccaccatatttaattttttgtgtcaattctgcactttagtgttgctaatactgctataaactgtactctgtcattgttagtctccttactttatttctctacctctgccaactcatctttcaccacgttttatagacttcatgtttctttaatgtaattgaaagaaaaacaaggtgatggttcacaaattgatttgtttccattattaaaggtttaaaaaatgttatatacaattttatgtaaagttatatataattatgtataaaggttaaaaaaattatatataaaattatatataatgttactttatagcatatatagtatatatacctatataaaatttagctatatataatatataattatatattagtattatattattaatatattattatattaatatattattatattaatataataatatattaataatataattatattaatataatagcaatatattatataatatattaatatataataattatataatatattatatattaataattatatattagattagatagaaaataataatatattaatattctatattatacatactaattatatattatatataaaataacatagatacattatatattttatatatatatatgctcttctttgccctcttgagtcctgttttctccttttaaattttgggatattttcataggttctatattgttgttatttttaatttgcatttgtttttcaataaagaaaggtctatcttggtatttgtacccaaatcagtgtgggtggtgtttccatgggtaccttcacagtttacctaaacactcttagatttgtcctctcatctcataagctggagagctggttgttctaaatttagcattaaaagtcaggataccagcagctggagggccctttgtaattattcaagaagctctaccagggggcaggttctgtttattctttttccttcagtctgccattttcttcacctcaggaccacaacatagctctgtccagcatccctcctagcactacagccccaggcaatcactgtagaggacctctactcctcagatgccatggctgggagcagcccggcacagccagactttatgcttgccatgagcatgcctgcactgcttggaacccttctgatgtgtgtttgttgaactgaagaggtttcaagaatggggtggctatggccgggtgtggtggctcacacctgtaatcccagcactttgggaggccaaggggggcggatcacgagatcaggagttcaagaccatcctgactaacatggtgaaaccgcatctctactaaaaatacaaaaattagctgggcatggtggcacacacctgtaatctcagctactcaggaggctgaggcaggagaatcgcttgaacctgggaggtggaggttgcagtgagccaagattgcgccactgcactccagcctgggcgacagagccagactccgtctcaaaaaataaaaataaaaaaagactggggtggcttcttccacaggccactgccgccaccactgttgactcaccagattcaatgtatgttagcattcttctactagatggtcctttgctcatgtcctgtaccatggtagtgttttcttaggaagaaggtttacaactggaccatcatatttttctccaatctagtcctatctatagtagaccaatccaaatttagtcaaaccattgtgacttagttggtttatagctagtgcacaactctcactagttttattcagtcttcctttggccacttctacggattcattttattcctgtcctcacatcagcattgttcccacaaacttccttctaaatgcttggtatccaccactctgtctttcacaatgattgccacatggtaggcctctaaacaattctaataagcagcttcccgaacatgttttatgatccattggcctggtttcccttcataggttcaacgtcacctttccaaactctttgacaacatggccaagatgcgattccagctagatgccagtggggaaccaaccaagacaagcctcggcatgtacagcaaagaagaggagtatgtggctttcagtgagccctgtgactgcagcgggcaggtaacacagtagccctttcccctccttctgcttttctctctcaaatgccttcattcaaatatgatcagcatcaactctaggagggcctttctgaccttggtccagagctgctgtccatgccctccaagagccagcttctttgacttgaactgatgttggagcagcagctggcgccctgctttcctctttcagggaaggacacatgtcaacattcatatcttttccttaaccaaagacctgtgcagagggaaataaaatgcacataaacagctacccaagtcaatgagaaaaggattttaaaatgattagcggcaccaggagacgtcaacatggcaacccctggagcatcctctgggagaatctggaacactgacaccctccctgggagaaaaatgtccttttgtggaaccagctgctttcctgagatgtcccctctctgcacaaatgtgtcttagtgtcacttcctcccacagccttccccttggagaacaaactaccaccgtgctccaggaactgcctcctccaaatctccatgtccaatgcaagggacacaaaccacgggaccatttaccccttaagcctccttcccatccattagcaccaccgataaatataagcctttctttatttatttatcgtctgaaatgatccagcaaagcattgcccctggggattctcatctagtgccaaataacagctggggtaaggatattttacagggttccacccttatcacctatatctaagaaagcaattctagtgccagaaaataatcgcttctcagttatatgagggtggccctggggtttcattcacaatatgttctttctgtagacccagaaagcattgagctggggaatacaatcctggtttgcgcttcatactcagagtggacaaggtcatgagaagccactgatttatttacacccagctcaacccagatttctatttccttgtatgagctctgggtgacagcccccacccccttaacctgctactctgtcctgcatattccaaatgcacacatcagcctgctgttaattaagtctgggtctcacttatcaccatcccggattacgtaaacagcacatctctctgcaccttctggcagccacttggggctgtatacaatgtgtgggctccctttccttcactccctcagactgagtggaagaaaatatgtaggactaaccaaaacttctcaggcacccagtgtctaacctgagttgttctttcaggtagaaatatggctgaaccatgtccttggtcacatgaaggccactgtgaggcatgagatgacagaaggtgtaactgcctatgaagaaaagccgagggagcagtggctttttgaccacccagctcaggtattctcctaatgggatccccatcctccatggttggggctgtcttcctccgcagcctcccccagccttcagcagctggtagatatcaggctggctgcatgcttcacagccagggaggcttgaatcccagaccactgtgaggggtcagcaggtgggagcagggggattaacaataatgacctaagtcaaccctgaccttgggaaatcaagggtgatctctttttgccctcattggctacagaagggagaaaatgtcaacagttcaactctttgagccagcctactttctatgtgccaagctctgtgctgagcacaggacacaccagtagggaacaagacaatgacacctgtcttgctggagtttacagactcatgtggaactgaactgctgacacatatgactggtgttttgttgttgttgttttgttttgttttttgtttgtttgtttaagacggggtgttgctctgtcgcccaggctgaagtgcagtgccacgatgtcggctcactgcaacctccacctcccaagttcaagccactctcctgcctcagcctcccaggtagctgtgactacaggcatgcgccaccagggctggctaattttttttgtatttttggtagagatggggtttcaccatgctggccaggctggtctcaaactcctgaactcaagtgatccgcccacctcggcctcccaaagtgctgggattacagacgtgagcctccgcgcccggccatgacaggtgttttaataggggaggctcagggtactctgggagcatacagatagttcatgaggtctggggacacgcccctgagcatatgatatgaaagctgagatgtgaagcaggagttagcaagttaaaaatgggagcaaagagcaaccaagtaggaggaagagcccaggctcagaagacagggtgagcaggtgtgtctgagccagagtaagcggaggaggagcaaaggctgcaggtggattctggaagccagtttctgtagaccttgtgagagagtctgacttgattctgagatagagtggaattccttataggtttctcagaagcataataagagagaagccagacctaacaagaaatgtttaaagtaactctggctacagtaggccactcctccttccctcagttaacagtatagtagtagtgttgctctgtttgggggttgcagacatttagtagtcatcaaagccatagagtagataagattgcccttgcaaagtatgtagaatgagaagagagtgcagaacaaattcttgagcatcattcagagccagaggaggaggaaggaggaaccagtaaagcagaataagaaatggtcttttgggagcagaaggaaaaccgggaaacagtaatcatggaaaccaagcaagaaactgttggtagcaggtaagaggtaggaaatgtcaaacacttctaagagatgaagcaaaataaagaggatgaagaaggttcatggataaacttggtgaggccatttcaggggagtggtagggaaggggccacattgcaggggctgaggagtgggaaaaggtagaaagtattcacagtggctgggcgtgatggctcacgcctgtaatcccagcactttgggaggctgaggtgggtggatcacgaggtcaggagatcgagaccatcctgcctaacacggtgaaaccccgtctctactaaaaaatacaaaaaattagccaggcgtggtggtgggcacctgtagtcccagctactcaggacgctgaggcaggagaatggcgtgaacccgggaggcggagcttgcagtaagctgagatcgtgccactgcactccagcctgggtgacagagcgagactgtctcaaaaaaaaaaaaaaaagaaaagaaaagaaagtattcacagtgaatgtgtgtgaatagcagggagaaacttggctacgaagaagagaggagaaaggagtccacactgcagagaagaagaggtgtttattaatagtaggattggaacatcctctcaagttatcccagtaaggctgccaatgagggggagcttctttaataaaatctaatgggacataaactcaaagggaaaaatggacaaacagaaatggtgctgtttactacgatgagattctccatttcacaaagggagtaaatcccatcaggcttccttgtttacctgtatcagaattttgagacaagagaatgtgttgcctcctcctattgcagtaaatgtcatctagagtggtgtcccccaaaccaaatgatactacagatgagcaatggatctaaattccccaccatgagtaatcaaagttatgcatgttccatacaaagctttccagcaaatagaagaaatatgtatttcaattgctttttctatttatttatttttaatctctgaaaatgcaaatcatattaaccacaattgaatttcaatatctctcatcttggcacttaaaaataggcactttaaggttttaaaatatctttaaaatgtagtgaaagtatggtagaagagcaaatgtgtgccacagatgatcagcagtggctcactaaattaggttgtcagaccacagaggagcagaagactgggtgtcattgggatggttgggcaacatattgtcatcctcccaagcttgggaaagttgctacctttgggaagtaaaagactgattcatccccgtcacaatttctagaaggcaccggccttgatcagagtcaatcttgggttcttctcaaccgaatgatacattttttcaggagcagaaagtgcttttcccacctgtaccgcaacaacttcacaccttcaagggtttagagcatatggttcacttagtcagtgctggtggaagagggagggatggggctcatgtcacccacacaattacatcctgagcccttgctgtgtgatgagtgggttggttggaaacagccatgataacagctttactaggcaactcttgctgccacaggtggccctgacctgtactcagatctggtggacaacagaagtgggcatggcatttgccaggctggaggaaggctatgagagtgccatgaaggactattataagaagcaagtggcccagctcaaaacccttatcaccatgctgattggccagctctccaagggagaccggcagaagattatgactatatgcaccatcgatgtgcatgcccgggatgtggtagccaagatgattgctcagaaggtgggtcccaaacatccagggatgcccacttttgtgtacagctacactgagaacagcacatacagccaaaatatgggggccccagggtctgtacagcactgaccagacagctgggggaggatcacagtggctgctcctacttttttttttttttttttgagattgagtttcgctcttattgcccaggctggagtgcaatggcacgatctcggctcaccgcaacctccacctctcgggttcaagtgattctcctgcctcagcctcccaagtagctgggattacaggcatgtaccaccacccccagctaactttgtatttttagtagagacggggtttctccatgttggtcaggctggtctcaaactcctgacctcgggtgatccgcctgccttggcctcccaaagtgctgggatagaaccctgtaatcagagcagcttgtgctttctatgctgtggtggccacagcatgctgcacactttagcagcagtcaacagccaaggcatcagacccctatgtgtcttgtggccaagggactacctgctgcctatgattcacccacctactctaccactctctctttaggtagacaatgcccaggctttcctctggctgtctcagctgcgccatcgttgggatgacgaggtcaaacactgctttgccaacatctgtgatgcccagtttttgtattcctatgagtacctgggaaacacacctcgcttggtgatcacacctttgactgacaggtgagcactggtgtcaaccactgacagccttactgctgtctggttcaggccagctagtgggcatctagggtcaaagtccctgtcacttgctatttgtccatagagctacagggaaagggcctgactcaacacagcctgtttaaagtgaaactgaaaggatgtagggcagagcctttcttggaacaaatcccagagcaaatcaatgagccgtgactttttgaggaattactaaatggtcatacacacccgagttctaacaccagccctaacacataccagctgtttgattattaaaaacattgacctaagttttggtttcctcatctgtgaaatggaagtggtaactcacaacttccatgattattgtaaggattaaagacagtaacgttgggagggagagtaggagggtgatgaagagaggtaggttaacagatacaaacatacaattagataaaagtataagttctgtcattcaacagcagaatagcatgactatagctagcaacagtgtattgtatatttcatagtagctagaagagagaacttcagttattcccaatacataaaaatgataaatactcaagatgatgaataactcaaataccctgacttgatcattacattctatgcatgtaataaaatatcacatataccccataaatatgtcaaatatgtatcaatttaaaaagcatactggtaaccccctcacctccatttacaaaacacaaagaagtatttctctctatattcattaaagttaagaaatataccatggaatgttatactgcacaaagattataataactttctaaaacgattctcttgaaaatgtcatggtgcaatttaatgaagaactcttaagtaagtgaataatgtattttgctttccaggcatatttataaaaataaatatggttcattaaaacaagcacataaaaaagacagtaatactcctaaggaggttagtatataagtgctcagtaatcgatccctattattattttcttgtcaatcaattgatcaattaactggcacatttattcagtacctcttacctgggaatgcaaagaaataagcaaggtagttccaaccatttaggagcttgcatgttttttttagaaagacagtatttccatcacttatattaattcacacatgaatgaattcacgccagacactgaacaagtcactgggaatactaagatgactaaaacattttctgcccttaaagtccaattctaatgagggaaataagacatatgtagataaaaatttaaatatcaccaaggggaaaagtacaaggccatagtataaaataaggtacgaggccatatgcaacaaatttccaagcaggtgactcagcagaaagccctttgagcacagagggccccactcacagtagaaggaaaagaactggaaaggcttcagggaagagatggtatttgacctggagcgtgaaggatgtattggattccagtaggatttaaataggttatgagattactgtccaggtgtccatgaaattgtatagaaatctgttcacacgtaacttttttctattaagaggatatacagcattcattaattgttaaaatgctatgcatccccaaaagttaaggagttactgataaacattgctggaaaatggcatattggtggcaaagtcacagacatgggaaaactcaagatatgttcctggaagagggagttccgactttgggggaggtagtcagccataaaggagtcagaatataaagtatgaagaatatattctttatccagtaagtagtgataaactattgagaaatttcatcagaatgtgaaatctgtactttatgaagattcatctgacagcacaacacaggtaaaggacagtgagggcagaacaataggtcatgatgcatgggagaaatgatattttaattccactgagatttctgtaaattctgctgggagttcataccctttccttgtaattccattgaacattaaacctcctcttccccaaaaggaattgtatgtctgaataactggttcactgagatgaatgacttgtaggtaatgaagagattgtcagaaattgtgagttacagttaaaatgaccagatagaatctgtgctattttttgacttttctcttttcctgttctcagtgatatcacttgtattttagtcaaatcctcaaatatatttccaagtatttgataaatatttccaattcagttaaattgcagtcactgtgttcatggaatgaataggacatggaaaatccaaagtaagtacttgaaaatcccagcacgattcatagctcaacacctcatagctgaagcatgatggtcaagataattcctctgctttttcatttctttaattcattttcctccccagtctggaaggggagaggagagtccgactcgaactgcttccctcttactctgtatctctcttttttgtgatatcccttagagggcacatcactgtctccagtggctctccactctgcatggaccaaaatgtgaactctgcatgagacttggtagtccccatcagccaccctgatgactcactccctacactccaactacatggcctcctttctgttccttgatcacctggagttcattccacctcagcacctgcacacacatgctttcctctgcctgcaatgccattctcaaggccgtctgttccactggtaccgtctcatgcttttgttctactctctgtcctcagaggccttccctgaccactgtttctaaaaggcagcctctcccaccacacacacacacacacacacacacacacacacacacacacacacacacacacacagagagagagagagagagagagagagagagagagagagagagcaggtaaccctgacagagcctctgttgatcttaatgtttcccccattctgaaatggcctggcttgcctcctccttgttggcattcccctttggaatgtaaacctctagcaatcaagaacctttgtctatcgtgtttgctgttatgtccccagcccctagtaagtgttgaattaataatcatcaaatgaatgaatgacatttaaatattgaggacccagatcataagattagacagaatcaagcaagggaagttgacttaggggcaaggtctgtccaggactctgtctgtgtgtctgtctgtgtcttggctcccagtgaagaagaaacagctactctgtgttttgctcttagctgggaatccatcttcctccctacctcagcttaagacaaatgcaaatagcacctctgcagagggagatgtcgatctctctgtagctagatggtaaaggaagtagcaactggagttgggggtggggggcgtggagtcttaacaggtgttacttgggccaattagttggaggagctcatcctgtctgggttaaaggaaaagtggttcccaccttttcattcagactggactcctctagtatctgtctttagggccattctcagtcattagcaggaaggaggtcctgtacagtcagtcttccctactgcagtgaggtctgcctatcttggaatataagctaatagtttgggagtttataccacttgggacagaataatgaagccattatgtatttgggcaatttgataaatctatcccccgctctagactgtatgttccgagataacattgaccttcatttcttctctactcccaggacctagcactgtgtctagcacacaatgggcactcaagaaatactccttgagtgaatgcaatgaaatgattcctgagcctctagatagggatgtgcccggccttcagaatatttccatcctttccaccaacatatcagacattatcattccaagtgataaaaagtacaagatttgtcttttccctgggccttcgcagtcgcccaggaattgaagataattacctcttttggatttagaggtctctagtatactagtgctgaataccttatagagggaaagggtaaagtttcgacaatgcattatttctgaaatagggatttatggcctctactgtgaaatgatgcaaataagaacttgaaaggaaggttagctaaaataatggtgaatactatacagaccttcaccttgtttgcgcattagttgcttttctgacaaagtagtatgtagctgaatacttatatggcaaattgcattttctcattgacttccattattatctcaagaaatgttttttgcacagaaaaaaattggcctcaacatagaaaatcacattttaaaaagcattcagcttttactggtgtgtagcctaagtacatttaattctctcctgcccgaagaattaatcaaatggacaattgatccatacaacctttgcacattcattaaaagctcacccgttttacagtacatccaaatgattatgcctgtttctttggaatttcccactgcctggatgggacttgaatatataaataggtgcgatggttcagtccttgtcacaggatttcggcaccacactaagttgaagaactaaatggaaatgttttttcaggctgaacaaaagcaattctcataagtcgtttctcgacctttggatgatctcctcctgctttgctccccttccttcaccttcacacacaaatgcacctttctgccctgtgctgtgttaagtactgttttaatcaactgcttatcaatgttgagtaccccttaatttctcaggaactcctgcaagtaggtgaaatataattgatgcaagagtctttcaaggtgattttctgggcaaggacacagctagcaaaagtcgtatgctctctctttaagtttttctctcatgtttttgctggagaaaatttggaaaggttagtattctgtacaaaagaaaataaaagtcacccatagatagccattgttaatatgtagtttgtttcattctacatgtagaatgttgaaaactgaaactgagatcatatcttatatataaaacttcatagattgcttgttttatttaacattatattatgtatattctctaaatatttttctaaaacactctaatggctgaattatagtctatttataagtatcccataatttatgtaacataaccatattatgggttatttaagttacatctaagctttcactattaaaaataaagctgtatgaactcacttatatgtacaattttaagcaaaaattttgtatttttccttaggatagattccaagaagcagaataattagatgacacatactttcaaatcgttcgtgaaaaactgttattcctactctcactagtagtttattaaagtattaattgcacaacaccctgactagcattaagtattactgttactttattacttttattattcaaaattgtatcaagtttggatttggatgtcattaattgctcataggttgaacatttttatgtgtttattagctattagattttcttctcctgttaattatttactactgttattgcccgtttttctctgggatattcttttatcacttctgtggttagaaaatccatgtttattttaagatcaatttaatattgcactatatttcattctagcctagtttattttaatttttcctttaacctgttttaatcatttaggaaatcttttgattactgagtaaagtgagtcaaaacatttttgtgaaaacattttcagttaccagtgatagaagtggccgaaaaaagacttatctcacacatctggaaaatgagtccagcttgctgcagtaataaccagctctgggacctaaactaggagatatcagggtttaaactctctcatatatcatgactttgcttcttctgaatgttgacttatttcttgcacaggctggaaagatggtctctatgcctatgcctttataacttctcactcagaaggaagatagaccctctcttgcctggcaggtatagcagattccttgagggaggtctctgattggtcctatttggatcatgtgcccatctctgagccagtcgctgcagccaatgagattgagtattttgcccatcctgagcctcgtcccccagccccaaggataggaaaggtatgattgacagcccatcagaatacaagctgtggaggagagatggctctccaaagggtgatattctgggcaaagaaatcccacaggaatgacagtggggagtatataatgttatttcttttgttttcaaagtgactagtgggcttaatgttttttggtgagtaatcagttcttcttaatgatttatgatgtttgctctaccatatttgaagttctaagttcatcagtctacctcaaaactatgtattctgttccatcagtctatcagtccctctctgtgccacagtatttaaagatgtttgctttatcctgagttgtaatatttgtagggtaaagctctgcatcatctaccttcatttccactttcttttttttagcacttctgtttcttctttcaaatgacaaattcaaaaatataaaccactggggtttttgattggcatgccttaatactttcaacttcatttggaagaaacagccatctttataatatgtggtatatttctgtttattcatatgtgcaatcatgttttttggaaaagtttatattttggttatttctgaatgtgatctctgggtctttttaaagttgtagttgctatagaagattttgtttttattatatatatttgtatatatatttatatataaatatatatatttgtatatatatttatatataaatatatatatttgtatatatatttatatataaatatatatatttgtatatatatttatatataaatatatatatttgtatatatatttatatataaatatatatatttatatatatttatatataaatatatatatttgtatatatataaatatatttgtatatatatttatatataaatatatatatttatatataaattttaatttatataaatttattaatattattattcaataataaatatattaaatttataatataaatttaaatttatataattttaaaaactcccatattttttaggttcactcatggcagagcatgtgtctgtagttggttattttttaatttctgaataatattcaattttatagatataccacatgctctttatccattcaaccgatggacacttagatgattttcagctgaggctgttataaacaataccgctctgaatgtttgtgtacaagtctttgtgtggacatgttttcattgctcttaagtgaatactaggaggaaaattgttatggtacttttatgtttaacttctcgagaaactgataagctgttttctaaagtggctgcaccattttacatttacaccaacaacatgtgaggattcccatttctccacatccttgacaatatttactattgtccgttttatttctttatagccattctggtggctgttaagtaatatgacatttggactttaattcgcatttttctaatgattaatgatgttgagcaacttttcacatgcttgttagccattcatgcatcttctttagtgtaataattgcccatatcttttgcctattgtttggtctgtcttcttattattgagtttgagaattctttgtatattctggatatgttgcaaatgtgtttgcagatattttgtcccagtctttgctcattttttttttcttaaaaagctttaagaaaaaaaatgagttatttaaaaaaaaaaacttttattttaggttttggggtacctgtaaaggtttgttacagaggtaaactcatgacatgggggttcgtggtacagattatttcaacacccaggtattaagtccagtgcccattagttatcttttctgctcctctccttccctcacccaccccaccaagtagactctagtatctgttgtttccttctttgtgttaataaattcttatcatttagctcccacttataagtgtgaacatgcggtatttggttttctgttcctgcattagtttgctaaggataatagactccaactccatccatgttcctgcaaaagacatgatctctttcttttttatggctgcatagtattcggcggtgtatacgtaccgtattttctttatcaaatctgtcattaatggacatttaggttgattctctgtctttgctttgtgaatagtgctgcaatgaacatatgcatgcatgtgtctttatggcagaatgatttatattcctctgggtatatacccagtaatgggatggctgggtcaaatggtagtcctgcttttagctctttggggaatcatcatactgctttccacaatgtttgagctaatttacactcccaccaagagtgtataagtgttcccttttctcctcaacctcaccaggttaatggtgtcttttgaagtgcaaacgttttgaattttgatgaggttcaacttatgaatttttattttatggaccatgcatttggtgttttatttaagaaatctttgcctaacttcattttatctttaactttcttttcgcttgtgtacaggagaaaaaatgatttttgtacaatatatttatcttccattctactcatttactaccctgtattacaaattctaaaagttttactcttgattttcttgggttttctaaatcactcctagaatttctaatcatatttgagacagacaaataatgagaagtgtaattataactactcaagtttagttactaggcatgctataatttttgctagagagatgatatgggtggcgttgctctcagttctgtcacattttgagaaagacatttaccaattagcataggcaaaggaaaagatgagcactggatgatgaagaatctcataaccagttggtataaggaacagatcctagaattgggggcatttatgctaagaacaaaaaattttcaaagtttaaatattaaagcgttatcaaaggaacggatttgttttaggttagtgcaaaggaaatttctattaatgcgatttctcacgttgagcttgaaacctattgaaagctctgggtctttttcacatggattttcatctacccacatctcctccagtctgcatgtatccaaatggttggaagattactttacattcatccctcttaaattggattttgttgggtctgtcccatcattttttcactgttaatattatttagaaatttgttctatcgtctatctagtaattatttcttaattcaagttatgagtgaagacattaaacatcagtgagctgagtatgcctcggggcctccctgaaggtagatactgttgcattcatggtcactcctcagttatggttattgaaccatgtggtagacagaattctacaaatgatctctaaggaccctcacccttctatagtctcttcccttttgagtgtgagtaaaaactgtgactgtgatgatattattcccatggttgtgtattgttatatggcaaaggaaaattatttaggtagacttaatataattatataagcccttaaaaacagagctttctcctggctccccagccagcagaaggggaagtcagatttgaggcatgagaagaatttgacatgccatagctggttttgaaggtggtaggggctgtgtacaaggtggcagaacagcctctaggagctgagagatcccctggccaacagggacctcagaagtgaattctgccaagaacctgaatgagcttggaagtagactctaccccaaagcctccagataatagtccagcccagccaacaccttgactctggccttgtgagaccctcagcagagaacgcacctggacttctggcccacagaagtgtgagataacgagggatgttcttttaaggcactgagtgcgtggtaatttgttacacagcaatagaaaattaatacaagccaactatgactccacctactctaggatcatctggaccacttttccgtgataagcacaggctattcatagctgaaatcaagatatagcagctttgatatttgctttatcttccagttgaatatctgtaccaaaaaaagaatttattgcctcaaaaataataccttcaaagtctgtcggtttcctacttttcaaggcactttcaaatatcttgtctcatagtatcctcataagaccctggtggggcagataagaacaaaacctgtagaagttatttgcccaaggaaagcaagactaattttagttcgatgttaagaagacctttcaaacaattagaaccagcccactgtggaatgggctgcctcctagaatagtaaactgtgcctcactgaaagaaaagactatatgatcatatttgaaggatttaaagggggagcacctgacatggtgaaagagtcaaacggcctcacctttaaaatcccttccaacgctaacgttcctgtgttcccactggaaccaaactaaatcaatccatatccatgttgggactcatcggccaggatctctcttccttaaggatcttttgccattgtcataattgccactgcttttgaagcagcaaatttatctaagtttctttgtacaaagaaaatgcaatgtcatggatcttaaggatgcttttgtttttaaggtacaaagaagtttaaataacttggctgagtctcacggacacttcatagtgaggcaagtttcgaactcattttgtcactccagagtcagtgcctgaaacagctctacatggtctgctggcccacactcgcaagcaggagcacatcagaggagctgatttgggtgtttgaagagatgagcgctctaacaggacctcagagagaatcctagagcagggatatgtcccaaaggacttgctgctggctcagtggcccaggcgtcatggcagcctcccttgtgacaaacagaaatactgcctctttctttttctttctctttttttttttttttttttgagatgaagtctcaccttgtcacccaggctggaatgcagtggtgccatctcagctcactgcaacctctgcctcccgggtttaagcaattctctggcctcagccacccgagtacctgggattacaggtgcgtgccaccatgcccagctaattttgtattttcagtaaagacggtttcaccatgttgaccaggctggtctcgaactcctgacctcaggtaatctccctgcctcggcctcccaaagtgctaggattacaggcgtgagccaccgtgcccggccctgtctttcttttttgcgttttttttcatggcctgagggaaagccccactgaccctgccttcaaactcaccagactgtccactttccctccctgaaccccagtctccccatatgtaaaatagggagattagaaatcccttccatctctggagttctgttcttgtgaggggaagacaatgatattttgacatttcccccaaaagataatcagaagctcagcagatgctcaaaaagagatggacccagtcccatgtatttattttcaggaactcttaactttttctatgcaacttctctttttgtgaaacctggcatttctggactcccaaattcctgagagccctgcagctccagagaaaagaggcctgtgatgcaccctcagccggcagaggggacagctatgggacagaaaggcaatgagagggaaggaaggtgatgaggtgagttgtcagggattgaagactctgctagttcagacagcttgtcctcctgggaggcagggggccatggcaggccctgagcagttgtagaggaagcccaaggctgggagagatagcaggcatgggatccacctggagccagaaactcaagagcccaggagggcaggttcaggtgaggccacgcatagggctccatgaatatctagctggaaatgcttgagagagaagagaagtgttaccaaatggtaacagtggccaagaaggacaagacgagacccaacttttcaccctaaccctgactcacctcatcatgccttgtggcaggtctgaagggcaacattcagcctttcaaaggctgaaacagataagggaattttgcacttaattgaaggagaaaaagggaacttaaagactttcaaaaccatctgggagctgagcacaatggctcacacctataatctcagcactttgggaggctgaggtgggtggatcacttgagccctggagttcgaaactagcctgagcaacatagtgagaccccgtctctattttttaaagggaaaaggaaaaaaaaaaaaacatttcggtccaaggtttagtcaagtcagtagaaacccagccaccatctgacataaagatggtgtcttcagagtctcagagtctctggtcatctcataatatcagattcagaaacaaagagaattaattttggacaccccctcacatggccccgcctggaagttgagagtctatgtattgatttgctagatattaaaaagttagaacagtggcacaattgtatcagctttattgaggtattgaggcataaattacatgccttaaagttcacccattgcaggtgtacaatgtacaactggatgatttttagtaaatagacagagttgtgtaaccatcactatcatccaactgtagagcatttccttcaccctttttgcaataatttccttctctcactccaaacctcaggcagccgctgatctgctggctatctcagtttgtcttttctggacatttcatatcaatggaatgacaacatataatctcttttttgagacagggtttcactgtgtcacccaggctggagtacaatgacatgatctcagctgactgcaacctcctcctcccaggctcaaacaatcattccacctcagcccaccaagtagctggaattacaggcgcactacaccacacccatctcatttgtgtgtgtgtgtgtgtagatatggggttttgctatgttgcccaggctagtctcaaactcctgggctcaagctatccatctgccttggcctcccaaagtgctgggattacagatgtgagccactacacccggcctgacaacatacaaactcccgtatctggcttctttcacttagcataatgtttttgaggttcgtccatcctgtagcatgtttggtacttcattcctttatattgctgaagagtattacactctacgaattaccacattttgcttatccattcactgttgatagatatttgggttgtttctagctttttgctgttatgaatactgttgctatgaacaagggctacgaacaggtagatattgtgctacgcacaagtctttgtgtaaacatgtattcttatttatcctgtgtaaattcctaggaggggagttgctgaatcatatggtatgctttattactttttaagaaatataagtcctttttaatagtaccagaagtaagcttaaagctgagtttattttattgttactggtaaaaagagtcccaaaaggattaaatggattgaatgtgatccattcattcacagattcatttgtgttttataaatagtttttgagggcctgtatgtgcctagagtgtgctaagttctggagattaaacaatgaataagatatagccctaccttcatgaaccctatgaagatatatactgaagatatatacaacatatgtcacaggaagttcaagtggagtactagctcagctgagggagcctctgctcactcaccccagtgttgggggatccaggaacacttagtaggtgaagtcaaatgtgagtcctgaggaattagtggccattagccaggcaaagattaaagaggaacatcatccaggtcgacttaaagagttgggggatgattgggggaggatcagggacaagctcagtcctagtgtgtctggcagatgaacggagctctatatggctggactgcagaggtttgcagcttcagaggaggggaacagtgagaaacagagctggaggagcaagcagacccagaagaagaacctgtcagggagcctctgatgccctgcatggagggagcactgtgatgagcttgcccgctaaagagtcctccccacagtgctgtggggagcgggaaaaaggggcagggctcttggctttcttttcagaagctatgccagatctcacatggccttgagccttagtcctatctcactgggcccccaagaatgatgacctatgccctcccgtgtttggcaggtgctacatcaccctcacccagtccctgcacctgaccatgagtggggctcccgcaggacctgcaggcacaggcaagaccgagaccaccaaggacctgggccgcgcactgggcatcctggtctatgtgttcaactgctcggagcagatggattacaaggtacagttccacccggcttcctgggggtgggggtgggggataggaactcagggcaccaaatcaaggctaagacgcatccgtgccaccctgacccagcttccccaggtctcggagcccagatcaggaggtctcagtttgctccttcgtggtaaagttggacgtttgaaccctggagttttttggcctccctataaggctttcatgtgatgaggaagcacagccctttgtattctcattccaccaatgagctctgaccacagatggctgacttcatctttttggatctttcttttattacctgcaaaatgaagaaactgaacatatatccaaagtcctaatttccctatttgacctagaaacacagaaaggctcacaagtagccaagatgaaggcacttgtcttcacataaaagcttgacgtatttgtgctcttctgtagaagtggacattccccagaatatcaacaggggcagaatattctgcaagggcaggcgtgatttctgaaagcaggctaatcaaccccgactcagagcacagacgcccacagaagacaagtgcaaagctaatattcattcaggcacgtacaattttttaagaaccaatgtgttccaggttctgagtcaccgagaaaagccagagaaacaaaaggcccatgaggtcacttctttagctagaaatattctgctcacaactgaaccttatatagcttctttttttcttttttttctttgtgagaactattttccaatttttctttttttttctttttttaattatactttaagttctagggtacatgtgcacaacgtgcaggtttgttacatatgtatacatgtgccatgttggtgtgctgcacccattaactcatcatttatattagttgtatctcctaatgctatccctccccgcttcccccaccccacgacaggccctggtaaaacaaaaatgtaataacagattatctccctctctcgttatttttgttatattgtatgtgtttttgtaaactgccttaagtcccttttgtcagcaggatgacatgcaaataaatttgcagtgaaaaaaagttgcattaaatagattaaacatttatatataaaagtcatgtgctatattgactgtaaaataaatttaatgtagttataattttagaaataatgcttgccgttaccacgtatagcactctgtaaatgagattcatcctctataatttaatcatttctgtagcatgattttgttgtgtagagttgcagcgtcctgtagcaccatgttttctcgtgttaagtaaacaaagcaaggatctagacccaaaaaacttgtcttccacgtggtcttcatcccctaaattttagcacagttgcttttattgatgaacacattaagataatgtttctctttaagtcaggctggaacagaaaggtggagttttctcccccctttatagaaatgacctcagccttagggataattttatgttctagatttttctatagttgagcaatggcagcagcactgccaaagtaagtagagtctcccaaagggaacattgtgaaagaaacactcatttggatgtagaagacgtggtgtattgattgaagaaaatcagccagatttcttcaaagtcatacctagaatagcaagcaggaaatggtgagttggctaggggtcactatggccattttactcaattctatcaaaaccaatcactgaaccctaaccccaccaattttgttaaaagtacagggtgaacgggggagtctatctttgttttttttgtttgtttttttgttttgttttttgtttttgtttttgtttgtttgtttttcaactataggctaagcttccatggaatacaggctagacacaggttagaacatcataaataagcatagccacagtgaaacatgccagaagggaggtgctcccttcctggacaccaaatatcccaggtaaccaaacagccccactaagctgtttgcaaacttcctctacctttgttttctggctgttcagaattattttttatggtaaaacactcgcaatccaattaatttattgagtattgcctttcctcagcatgtgctgagcattgtgcaggatgccaaaaacagatcatatggggagagagagggagagagagagagagagatggatggaggatagatggtagatggattttaggtagataaatgatagatgaatgattgatgagagagagaaagagagagatagtataacccgattttatttggagggacaaaggatatatgatatcatcaggggagctagttaacactcagatagcataaccctgggtgctcatgtgccctacaaactttaggccctggaatattccagagtagggggagagccacagagtgggctggtcaggaaagacatgtggaggacgtgatacccaaccaaggctcagttttggggttggtgacagagagagcatgtggcattttcacacattctaacccattagaatgtcagctttaaagccatgaccaagttctatgtgtggccaatatctgtccccagccctcattctgacttcaccccatgagccctcctcacaggacccggctgggagaggagaaaaagggtgcgaggtcaggaagagctgctgtgcacttctccaggggagatttcgatgtgtcattcatgacactcacagcaatatactctgttcaggtctgtccatagtgaaagctagaaataaatgcggaacaagggctaagctaccttacagaggatcaaaaacaggagataaggaggggaaggactgaaagccactgaaagcatctcaccttgaagtgggggatgcagaaaggaactgcaggcttcggaactggagcaaaagcataaagattggaagtcagacgaaatgagaaaggaagagactggaagcaggaataggttttggtgagagcatctcagtcattcaaaccagagggaatgaggaaccagctgatgtggtagtagacatggaaaagcataagaggcttaaaatataacaaggtaagtgatatctcgggaatatgggcaggcagtcagtggtgaagcaaagggagaggttgaagaggagagtctaggctgtggtcaagcgcccttgctatcccctctgccttagaaatcctataagccgcatcacctcagttagctcatgaggactgggtgtgcattgagctggggaggacaggagaacagcgcaaagacttgaagcaaaggtaaagttattgctttactctcttatcctggatggaaaacctataaaaccagccactttctctgaaaatgactgcagtttcagtgctgaaacatcctttatattatagctgtaatactttcccctcttgacctcaatttggagatgctattgcagggacatcaaatggttccaaacctgaaagtgtttggaattatttccaaccctctctgtagcagccatattgtggatactacacttttccttgagaccctactcccttcacttcggaaatgctatacttgcacagtcctcctcctgagtctctggtctcctggctcctcggtctcatttgctgatcctcttttataatttccagtgtgatgtgtatacctatgtctcctttatgaagccatgtctattctccagcttcaccggagtcctagtcccgtctctctctaatggggcagtgggcatctcttgaatgcccttctcttgcattgtggttagcactcttcctttctccctgccagattccccaccatcaggaaggatcatctcattttccctgagatcctggtggaaaacttcaggaacctgggttacttcatgtccttccttccctacctctaatcggtcaccagtgtcgattgttcagcacccttctcacttccaggcctttgccctattcttgccattcgcctagtcccaaagctcaccatcccacagcaagataatgccccagcctcgctgacaggaccaggagatatgtggtgagctaaacacatgggttactttagggtcctggggttcagccacaggccctggggtgggggggagaaacataggggtgacaagcatccacctatggaaactccacttcctttattttatgttttgagttttcattttataaaaagggtctgcagtttgaaaagctttcaaaatcactgtaaaaaattgaattttttttttctttttttttgagatggagtctcgctctgtcccctaggctggagtgcagtggcacgatctcagctcactgcaagctccacctcctgggttcacgtcattctcctgcctcagcctcccgagtagcttggactacaggcgcccgccaccacgcctggctaattggttttttttgtacttttagtagagacggtgtctcactgtgttagccaggatggtctggatctcctgaccttgtgatccgcccgcctcagcctcccaaagtgctgggattacaggcgtgagccactgtgcccggcttgttaaaaattgaatttttaaaacatcttttttattgatacatcataactgtacatattaatggggtacatgttatattttgatgcacatattatcaataatatttatcaataatatcaataataattatgaatatcattatacattgtagtataatgatcgaatcagggtaattaggataaccatcatcccaaagatttattgtttctttgtgttgggaacattccaaatctcctcttcagctattttgaaatataaaataaatgattagtaatcatagtcccctattgtgctgttgaacactataacttatttcttatgtctagctgtatgtttgtacccattaaccaacttctcttcattttctccttcccagcctctggtaaccatcattctactgtctacctccatgagatcaacttttttagctctcacatatgaatgacagcatgtgatatttgtctttctgtgcctggcttctttcacttaagataatatcctccaggtccatccctgttgctgcaaatgacaggatttcattcttttcaatggctgaacaatattgctttgtgtgtatatactacattttctttatgcattcatccattgatggacacttaggttgattccatatcttaactattgtgaataaacatggatgttgatttctgaatttccacttagtatttgtgacacttggattgttttgcaaatgaaatggaataatgtaaggcagtggtccccaacctttttggcatgagggaccagtttcatggaagactatttttccatggactgtggtagtgggggatggtctcgggatgattcaagcacattacatttattgtacactttatttcgattattattacattgtaatatacaatgaaataattatacaactcaccatcatgtagaatcagtgggggccctggtcttctcttccttcaactagttggttccaactgggggtgatgggagacagtgacagatcatcaggcattagattctcataaggatcacccagcctagatccctcacatgtgcaattcacaatggggttcatgctctcatgagaatccagtgctgccactgatctgacaggagacagagctcaggcaataatgcaggtgatgggaagcagctgtcaatacagatgaagctttgcttactcacctgctgctcacctcctgctgtgcggcctggttccttaacagaccatggacagttgcccagaggctggggacccctgatttaaggtacacaaacacaacgcctggaacttccatcacctcctcagacaggatgtccctgacagctcaatctgaagtctccatgtcaccctcattttaagactccagtgggactttatcactgtctgatttgttattgctcattgtctgttttccttatgggaatatgagacccatgagaatagaggcatcgtctatcttgttcacagctgattcttcatgacctagaacaatctctggcacatagtatatgctcaataaatatttgttgatatgaaagtaaaaagaaatctcttaattccagaagctcagtgaaaggtgggttttatttttcccttctccttcaaagtctgccctacatcaggacacagtggctcacacctgcaactcaaacactttgggaggccaaggcaggtggatcacttgaggccaggagttcgagaccagcctggccaacatggtgaaaccccgtctccactaaacatacaaaaattagctgggcttggtggtgcacgcctgtaatcttagctacttgggaggctgaggcagcagaattgcttgaacctgggaggcagaggttgcagtgaactgagattgcgccactgcactccagcctgggtgacagagcaagactccatctcaaaaaaacaaacaaaaaaaattaaagtctgccctaatgtccaacctagcctatgtggcagttagaccaatcctctcataacaatgctctgctcatgttctctgctgcaaacctccaaagatccctcatagtaattcaaggctttttacaaccatgactttatttagtaattcaactttccaatcaaaatggctctgtcatttttctctgcacatatcattattctgcttgtatttcttccataatcttcctcctcctggaaagccttaccccttccattctatctatacagatactcctatcctataaagccatcatttcttgtgtgtgtcctaaagcatgtagttttctgtgagatccccatatcttctgactctaatcttgtgacctttacactataccaataattgccagagtgcattctgagaaaatcaggggttatgtgaaggaaaaataatcctagccatgtaatgcagtgaaactaatgtttttgttataggatttctcagggcccttaaacgctaatacaaattgtaagtaggccaaaacgggttgaagaatgtgtttcccaaatttgcttgaccaaaaagccctttcttcgaagagcatctttcaggcctgtggttccgcggaataaactttgtgaagtactgttgtgctgccatctgactttcacctctttggcaaaactgatcactcaggagcactctgaccctctcttctgtgaatatgacatttgtggtctatattattcaatggaaccactactgatgcagtaattttcctgtttttatgtatataccttatctcctcaacctgaccaaaagttcttagactgagctcccctatgtccagcacatgatcggtgcacagagctgatagtcaaaaaatgcccactgaaggctgggcatggtggcttatgcctgtcatcccagcactttgggaggccaaggcgggttgattgcaaagtcaggagtttgagaccagccctgaccaacatggtgaaaccctgtctctactaaaaatataaaaattagccaggcatggtggtgcacgcctgtaatcgcagctactcgggaggctgaggcaggagaatcgcttgaacctgggaggtggaggttgcaatgagccaagatcgcaccactgcactccagcctgggcaacagagtgagactccgtctcaaaaaaaaaaaaaaaaaaaaaaaaaaaaaacccgctgaataaatgaatgggacttttccattatttgcatttccctggcattttaatgacgtctccttgccaatgaccttgtgagtgtctcccaggaacctatctttttggttgccccgtgacttaccagttcatattgaatgcccaggatggtttttacttttaggacagaaatgcattattcccttgtaaattccttccctgctctcatttgaaaagatttacctttagtttgtgtgtatgtgtttttgttttttggttttggtttttgtttttttaacagatgttatcaccccctgtctttgtctccagctccctcaccactctggaaaacctgggtggttgggcataaatttaaagatacagacgtaaatttttccatcagtgcatgacaaaggctgggtggaaggctttttgtctgtatagcataagaaaaatcatcttttattcatttcctgggattttgaaagctaccgaatcaacaataatgcaaccctgatgacattttaaagggattttcatccaagtgtcttgaaaaggttctgtttaatcctgtgacttctgttgacaccccataaccatcaaacatttaattgttcttgaaattttaatacaagtttctgaccagtggtctttagggggactagaagtatctataataaaggggatggagaatggcttcaacatgtattgataagcctggcccgttggtaatttaatctttgtgcattttcttgcagtcttgtggcaacatctacaaaggccttgctcagactggtgcctggggctgctttgatgagtttaatcgaatctccgtggaggtcttgtcagtggtggcagtgcaggtaagggccagaagttggtgggagccttgtggtcttcatattgattactgcggaagtctatgtcctcttgttttctacctctcctgagcatctacgtccctttttcccttgtcatttcatgcccctttctccatcctctaaaatcaggctccagggaagctgtcctccaaaatgggtatccttctgttacccaccaaagtagaaccatttactggctttgggactctgtttcgttctctgtaaaatggagagaaagaatatctgtcctgcctgcttcatctgggcacagaaacatgaagatggcagagctcagctcctcggaaaggccatgttctttggttataaaccaaggcttaaatttcagttattttatttcctattggaatctttgggaaagttattccaccacgctcagcttaataaagtgaggaatatggcatgaatcgtttttgaatgaagtcgcttctggggtgagattttatgtaagcatgccccttgtctttcaagtcatccagaaagcatttattaaacacctacaacctagtaagtgttatgcaaaagacaggtgaagtttcccagttgaatggaatgtgatctctgacctaaaaaaaaaaaaacaaaaaaaacttgagctcttgagatagacgtgagtactttcaatgttctagaggtgacttaaattctgactgagatgagacttccaaatgcattacattgaaaagatggagaggattttggatttgggtcaggatcccatgaacaatcggagcagtaggagggtgaagggggggaacgtttgaataagcttttgttgaaattctgtaccaggcacttttcatacatcatctttcacatcatgaaagatctttcacgtctttccaccatggccctacaagccactattctccccattatgtatgtggaaaagctgaacatcagaggagaactgtatcttgtccatgggtagacttttggaaagtggtaaggttggtatgtgcaccctgtgcccccaccaacactgtccaggtgcagatgtgggcactgatgtggtgtctagtgggtaaaatgccagaggagaaaataaggccagagagacaagttcgaacccaatagtagcaggcggaaatgccttcctcagcaggcatcagagaacccccagagacatctgggagggagattgcccctctatttgccagcaatatgaaggaggggctgagcagtaggaaaactggtggctgagggcaagtcaagagtctctcccaaggattcttactgcagctgcacaggctccattccccccaggaaccccatctccaagataaagcacatcgtttgccagcttctattccacatgcctccctgcaggctgagcaccccccttctcctgctaggggcggctggtttcagaacccccatcctgcccttaacagagcaaagcaatcacaagggcaccatgtgatgatcaaagctgtggcgaggtgcttgggacaattatgtgcctggtactcctagtgtgtgccgcacaccatataatcaaaaatggtttaattttgcttgtgtttgcttttatttccaaagcagtatgcgcacagtacagaaaaaggaaaaatgtagctatgagagactctttggtccctacaggtttctgtaatcctttcaggtccagacaaaggaataaggaaagcgtttagcttgactgacatttttctaaggcaagagtgcgggattgaggggagggtggcagaaggggggtgggaggaaacatcatgcaaaaggtcatccctggcggggaaagatgactgagccagcatcatccttgtccccctctgccctggcaggagccagcttccatccacataggtctcacatgtggtcacctctcatcccataccttttcacaggtaggtgtggacgtggggctgtgggtggggcactgaagcaaacgcaaagctgaacagcagtagggctcagaccatccgcaaatccatgccaccttcatctccagctgccctgaaagccacaggcagtcaagacactctgctgggtcccttcactcaccactgctccaaggtggcctgtctttccatctcttgtgtttgacagccactgactcttgtccaaactgttccttgatgaagctctgaaagttgccagaacgtgaggctcttccctggtttccagtggtgaaatatggtttttccctttttttgggtttgttctgttcagcagcagttagtagaggaaggaagacaaatggctagcctggacactcttggactgaaacccttgaccagcttggcttgaaagagctggttgtgtgcatgtcagtggcattgcatgagtgtagcttgaaatgggctatggtgagagtccttccatcatgaaagctgccaaattctacaaatcaagggcgtttttgctctcctggagagctggttgttaaaaatttaccagcacacctctgccttgtaaggatgtaagctgagtgttgccagatcttttacgttttaaagagagaccggacatccagatttttataagaaatcaaatatgtttcctggctgctttcacctttggctggtcacttcacaacctggaataaggaataatgccagtgttcaatgctgtctcagccacttactagctgtgtgaccttgagcatatccatgtctcaaggtccacatctgtaaagggagttaataatagcacctccttgaggcagttgtaataatttttaaatgagttatatctctaaagcactgttttttaaagccctgcagagaatagtcactcaataaatgctttgttgatgatgataatggtggtggtgatgttagtgatgatgatgatgatgatgttaatggtgatgatggtagtggtgatggtgataattatgctaatgatggtgatgctgatgatgatgatggcggtggtagtggtggtgatgattctaatgatgatgatgatggagatgataatggtgatggtggtaatgatgatggtggtggtggtgatgacggtgatgatgatgatggtggtggtgatgatggtgatgatgatggagatgataatggtgatggtggtaatgatgatggtggtgatgatgatggtggtgtcagtgatgatggtgatggtgatgatgatggtgatgatagtgatgatgatggtgggggtgatggtggtcatgatggtggtggcagtgatgacgttgataatgacagtgatgatgatggcagtgattataatgttaacaatgatggtgatgatggtggttattatggtgagaatgatggggatggtggtggcaatgatggtgatggtggtgatgatagtgataatgatggttgtgatagtgatgaggatgattaccatcattattatctgaacactgcaggaaatgggttgaagagaagtagaagccgggatacacagggtagggaaaaagggttcacatcctggtctcacaggtcttctctttttttttttaaattatactttaagttttagggtacatgtgcacaacgtgtgcaggtttgttacatatgtatacatgtgccatgttggtgtgctgcacccattaactcgtcatttacattaggtatatctcctaatgctatccctcccccctccccccacccaacaacaggccccagtgtgtgatgttccccttcctatgtccatgtgttctctttgttcaattcccacctatgagtgagaacatgcggtgtttggttttttgtccttgtgatagtttgctgagaatgattgtttccagcttcatccatgtccctgcaaaggacatgaactcatcattttttatggctacgtagtattccatggtgtatatgtgccacattttcttaatccagtctatcattgttggacatttgggttggttccaagtcttcgctattgtgaatagtgccgcaataaacatacatgtgcatgtgtctttatagcagcatgatttataatcctttgggtatatacccagtaatgggatggcgggtcaaatggtatttctagttctagatccctaaggaatctccacattgacttccacaatggttgaactagtttacagttctcacaggtcttctctatgcccttcactccttctgagctggaccaacctcgagctatcttatcaagcttaacaatgtactaatcaatgaggcagtgcccaacagccattgttgcccctggatagtagatagacactgaatttgctttattttgaagctgcgcaacacaaggtcagcaatgcattctctaagatcacttagttcctgtttgtttctggaatcaaatgaaataagtttaactggggggtccctgatactgtcacactctgatctaggaatatacccatcagagacatttctcaagaaagtggtctgacaacagcccaggcaaaatctgagcgggtaacatttgaaatcgaatacccatccaaggagaaaattgcacctaattattcacacggcaatccaggctggcatattggttcagaagccacaccagctgctgacagttctccaccaccctcccctctcctcctctccactgcttgtccgtctgtgctcctcttcccagtaactcctacagaagcgattatgctgctggtccacagcatctttgtcagtggacattctcatgtctccatgagactggtcaagcaaagtcacatagccacttgggaaaaacaccagtgtgtcaattccaaaaaaaaattactctgctgtttaaaaaatgtctaagatattacttacttttttctggaatatcttctttactattgcaatcagctgtctatgctttgggttatctgcgcccggggacatgtgccacgaggacacaacccaatgccctgttcccctccatgccctgtggccaggccttcctggcactttcttctcttccctgcattacaagccccaataatgggttgggcagaggcaggaagcaagtagaagcagaagatcagtcagcaaagacttgggggcccaccatagcagggctccaagtactccaggcaccaaacaaatgctccagtctcagagccgagggagcttcccatgtaacaccctttaaagagaagcttaaagtctaatgggaaaaaaacccagaaatgttaaaatgtttaaaaagtggtgagtgggttgcatttcccgaaggcaacagacttcaatctgccattgcagtgggaagcgtggagcgggccagggaggatgttaaatagcacatggcatttggggcaaagacttgaaaagagaatgaccacaggggaccacaaaatgagccactctcctagaatagaagggccaaggtagaggggtgacgagaaaaagccaagatcccagtagcatagggctagcccatgacctccttaaagtatgtcacctgcacagagacagcatggccttaatacttcactgagtgagtcagacacaaggccctagcctgagtgggaggatacagggacagaaccctctgtgatcagcagcttccagtcatgaggggaaagatgtcatcctcatgcaagaaatgcagctcttatggtcagacgggcacacaaggcttgtgcagataacaaggttgaccactggacgtcagggctggcttgcaatatatagaagtaaaccctagccaggtgcggtggctcacgcctgtaatcccagcactttgggaggccgaggtgggcagatcatgaggtcaggagattgacctggctaacaacctggctaacacagtgaaaccccgtctctactaaaaaatacaaaaaattagccaggcatggtggtgggagcctgtagtcccagctacttgggaggctgaggcaggggaatggcggtgtgaacccgggaggtggagcttgcagtgagccgagatcgtgccactacactccagcctgggcaacagagcaagactccatctcaaaaaaaaaaaaaaaaaaagtaaaacctgggcaaattatccaaatgataaggcagaaaataagttccatcaaagatgtgcaattgcaaggaccatagaggctggaaaaagacagtaaaaccatctggctgaggggcaattgtgggccatgaaactgggatggggcagcgtggcccagtggcaagaacagttcactgactttcaggtaggtgccctgagagtgacagcagagggtgccaggcatggctggtgtcatgtagccccacgctattcaaactgtgagccaacagcaccagcatcccctgggagcttgttagaaatgcagagtctcaggccccaccccagacctgctgaaacagaatcttcatgttaacacaccctccagtgattactacgcacaataaaatcggggactgtgccgctctggcacagtcatctcaaccctggctgcacattagaatggcctgggtaattctacaaaatagtaatgcacagtgtccaccccgaaaagatgttgatttaattcctgcggaataggaccagtgtatcggtactttctaaaaactttccacatggttcacacgttcagcaaattttgagaaccagagctgagagagagactgaaaaatgaggaaaacaccgctgaggactgtagagtttgggttcacatcaagacccccaagactgaggccagtttgtcccagccagtgctctgcaggggcaaagcctctccaggcccggtggggcagaaggaagtgggggacccaggctcatctgagagagggagagaggggaacctctggccttttccaggacccagactttgtgaaggcttcctggaccctgatcattgttaagtcccagtgatttgctctgcagactcagttgctgctaaatcccatcctgtacaaaccaggctaaccaaaatttctatgagcaccgatgctccgaagttatctacatctttgagtctgttcaacaccctcccgtctgagagagggaggtcagtatgcagctatgaatggggccatgtgggcagaggtagggatgagtagaaatgtaagaattgactggactgcagtggttctcaaatttcagcgtgcatcagaatcacccggagggcctgttccgacgcacctcattggaccccattcccagaatttctgatttgatttatcttggaggtagagctaagaatttgcatgggaattggtttggacccaaggacacgtggtgtgggatggaggttaagtgccttatgtcttctcagcctcagagtcctcactggtaaaatgttaggtctagatcagggcttgtcaacctaagcactattgatgctttgggctgatcattctgttttgtgaagatctatcctctgcattgtggatgttgagcagcaaccctggcctctacccactgaatgccgacagcaacccccattccttgctgtgacaacaaaagtgtctccagacattgccacacgacccctgggagagagggattgcaaactcattcccagttgagaacaccggttcctacatagctttccatttttttttgttttgtttttttgttttgttttgttttcctttttcagatggagtctcactctgtcacgcaggctggagtgcagtggcgcgatctcggctcactgccacctctgcctcccaggttcaagcgattctcctgcctccgcctcccaagtagctgagattacaggcatgtgccaccaggcctggctaattttttgtatttttagtggagacgggatttcactgtgttagccaggatggtctcgatctcctgacctcgtgatccgcccgcctcggcctcccaaagtgctgggattacagacgtgattatttgtctttttaatgggtggcaaaactgtcttttcttattttgtggaaagtatgcctctaaattataacaaacatgatagttttcaaagtaaaacaaattgctctgaaaacgtatatgcttgatgagaaactggtctgtggctggcacagcactccttctggtacaagagcctttgggggaagtagctaaaagcatgtgcttcggcaccagattgcctggcttttaagcttgagctgctccacttaccaactgtggggtttcaggcaagtttctttttttttcttttaactttttattttgaaccaattttagatttatagaaaagttgtaaaaatagcatcgaatttctacatatctcacttttagcctccccttaatgctaacatcttacataaacataggacagtttcttaactgccttctgcctcagtttcttcatcggtaaaatgaagatctgagactacctatcttagacaactgttaaaagcttgggatggaataattcacagaaaatactcaggatcgtccctcgtacatattaagtgctcaaaaatgtcagttattattttttgttattcactgtggctttaagatcttcagaaaacgatgcattttcgatagagaaacagatcccaatgggtgagatgtgcctggcagccttagctatcagttgccaaacgacctgtgtgtgtacttccgtctggctgggcttgcatttaatccatacatccctagttcacctgcttctccacttccccctccctgcctccaagcatcctgaaagaccctctggcctttcccaggacctggacgttatcaaggcctcttggaccctgatcattgttatgttccagtgatttgctctgcggaccgcagttgctgctaaagcctgtcctgtacaagccagcctaaccaaaatttctatgagcaccgatgctccaacattaactgcatctttgagtctgttcaacactctccctcaagagcccctctacagaattttacacaaaagcacagatgcctccaatccaaaagtgcatcataaattcttgctgagcgtgaggtttctgggcttcggtgtttcgagagagaatgctgagtcagaatgaacagcagaaaaggtcccaggctcgtgccttagtcttcgcccaaaggtagcagagcaacttataaacgctaattaaacttgctttcccactccctaataaggcgagtgctctgtatattttatggatgggaagactggggacaaaggagagaaccagcctttgccagtcacgtaacttgcagggtgatgaaggctgcaagaggctccatggcagagctgggctgggctgtgagccccacgcaaaccagcagagcttgatctgtttggccagcgtcctggctgctgaagcctgcttctgccaggatggcattgatattctgcacgtagaaaagaagtctcagtttcaaactaattgctgtgagctcaaacgcatacagtcattagcgcttcactctgggaagggagctgaatcctaattgtagaactgtcatgcatccaggcaaactgtgtactctggagacagccgtgcccagtggtagatggtccagctgccccccacccacccctcccaccgtttcacacacacaaccctacagccccatttccacagaactaggctaccctttgctcttctagcaccctggacttagccgacctgctgaggctcattcaaaaccttgcaccggccccagcttttgggttttgcttccgagaacctgagaggctggaaattcccaaagaccttctggggccgggctggacaaggctgtgggctagcctgaaagtgtgtccctttcatcttttctctgttgctgatcatttttgcttatgcatttccaagcaccaggtgtgacaataaatggttgaatttcacttctgcctctcctcccactgctagagagtaatctagaacatatatctgactgggccaagcttcaggataaatcctcctctgactccagtctacatttaagagaaagtctgattttctaaagaaaaaagcactaacagccctctgtgtctgacccagcctacctttgctccatctgtaaagggtcacctgttctggaggtatagtctgggggatggctatgaggagttaaaccaagacagggaccacagttgcgatgaggatggtcacatgggtatccctcatgttagctggtatttctaagcaattttctttaggctatgtacttcacagactttatttcatttacttagaacaagctcagcaggtaactatggcatcctcaccatcacacaatacctgaaagcacaggctgcaggatccatttgcctggattcaaatcctgatgccccaattagtagctgtgtggctttgggcaagtgtttccatctcaccatgcttctgttttatcagagatggggatgatgtaattgaagtgcccccctccaagcatggtgaagctcaaatgagttaatacatgagaagtggtcagaactgtgtccggccagtggtcagccctaatacacttcagccattactacagagagaacccacattcagggagttaaacacctgtttgctgttccctcccatgctcttagccacagtgtcataaatgtggctgtgggcagccagattcatttttctgttttgttttgagacgtagccttgctttgtcaaccaggctggagtgcagtagcatgatctcggctcacggcaacctccacctccctgattcaaacaattctcctgcctcagcctcccgagtaactgggattacagatgcacaccaccatacccggctgatttttgtatttttagtagagacggggtttcaccatgttggccaggctagtcttgaactcttgacctcgagtgatctgcccgccttggcctcccaaagcactgggattataggcatgagccactgtgcctagcagtggccagatttcttttagacatgcaaccagggcctgtcagtaaagggtctggggtgtggtcatcatgcctgtctttcagtgaaagggtccacaggacagttcttcgtgctgtgtgtgactacagggttccagctttagttatgatccctccactaaaaggcaattgaggaatttctcgctgattgattggttcaccaggtaaaaagcattcaagatgcgattagagataagaagcagtggttcagcttccttggggaggagatcagcctgaatccttctgtcggtatcttcatcaccatgaacccaggctatgctggccgcacagagctgccagagaatctcaagtctctcttcaggtgagtgtcagttctgccccatgcaaaagccccaaaagagaagtttctttcatttttccacttaaaatgtgtgacatatattttaaagaaaatttggaacatttggaaaagtagatttgtaacaaccttctttaatgtctttaatgcagtaaaattgctttttgcttaattgtgttctgttctcctctgtatatacattttaaatccatacgttggtagcctgcatttgcggtctacatagtttcgtgttgtttttatttcgtagtctctcataatcatatcctaaatattttcttctattagatattcttgataaatctcatttcatggctgcatacttttttatcaagtgcatggtttacaatgtaattaactactcccccatggttaaatattaagactttctaacatttaaaataaatttatgcataatgctgtaatgtacatctttgcatataaatcttttttttccgtatgtatgattattttccttggctagcttcccagaagtggaattactgtgttaataggtagaaacatttttaaggctcttgatacacattgccaaattgctttctaaaaagagtagtaccaaattacactcctcgtagcgacgcatgagagcacctcttttatttcacccttgctaccggtggacattgccatattttaaactcttctttattttgataagaaaacacaaatacatttcatcgaagtagctggaggctgcattctttttccagaaaagaaaagttggcccaacaaagagaaaactgaagaatgcttcatggcttctgatcttctggttactgaacttttacctaagtgagatagactgtggggtgctatgacaaaactgttttgtctcatttttggactcataaacacagtgctgtctgtccggagaggttgtcaacactttactggatttccagaggcataggagatcgctgggcagctccctgagtgcttcactctctcagtcatggcaaattcccgtgtcgctggggtgacggggccttctccttcttcagccaggtccctgtgttaagcaagagctgctggaatgccaacaagctgtctaaacgggtgctacagaaaactgcattgttgaccatttgtttctacaaagtaattattaaataagccttgtgttacaaatgattatagaagtaggtgatcacccagataagaattctttcttacctttttttcttgctgaatttttttgctgactggaattgtctttgccagttcagggtgccataataaaaatactgcagactgggcggcctaaacagcagacatttatttctcacagttctagagactgaaagttcaaaagcagggtgccagcacggtcaggctctggtgagggctctcctccaggttgcaggcggccaccttcttgctgtatcctcacatggaggaaagaggatgagctagctctctgggtagcgctccaccctcatgacctaatgaccttccaaaggcccatctccaaataccatcacattgcattttgggggcacacaacatttagtccataacacatacccatagaaggaaatttggaaataaacatatttttcaaaatagtaagtacaaacatctacttttacatttaattctctcaaaggccctatgaggtagtactagtttctccagtgtttagtgaagaaacagatgcattcagcaaattgctcagggtagtaaccctagttactagggttagctagtgaaccaactagtaagcggcagaatgctagagtttgaacccagagcccctattcctccccgcccccagtcctgtcatccaggaacaatcagtgtaaccatttggcattttttttcccaatactgcaacagtagcgcatttctttttcaaaattgggatcagactatatatagtttagtatcctactttcattaactaatgtttctttgtcattatataatttacctttcacaccactatttttcatggctgcatagtgttctgttgtacaaatgtatatttacccatatgttcaggttgcaaaataattttgagaatttaagcagcatttggttgctcctttgaatttgaatacaatgtaaaatatttcaagaaaaaatgtgctcgaatgaaatgtttttgaaaatttcatatcagtatagggaaaatgcaattaaataaatgtaacaacctattacatacccaacaaattaaaaaaatgtaagtaattttaaaatcagatgtttttagtgccagaggaaaaaaatacaacaaagccttctataaatccctttctatattattgtatatgccattctgtgtcaagatagggttaataagtattaggttggtgcaaacataattgcagttttgctatcgaaagtaatggcacaaaccgcaattatttttgcaccatcttaatacatattttagacctcatcattagaaatttacatttgtattcaaacaagtacaggatacaccctaggtgtctaggcttagaggagacacacatttggagaatgaagaataggggaactctcagtttcttgaaagtaatggcaaaaaccacagttacttttggacccacttaatacatactttaggcctcatcaagagaaatttacatttgtgttcaaataagtacaggataagccctgggtgtttaggattagaggagacacacattttgaggatgaagaataggggaactctcagtttgttgtagatacccagagaaactcaattccttattctaagccttgaatctattctaggcaatttgctttactaattcatgccttgtgtaagacacactgaactcaagtcacaagacttgagtggtagctccaagtctgcccctgcctgctaacattatccagccccttaagaaggcgacttcatttcctttatccttagctaactcatctctaagttgaaagtcttcatgctaactgcagcagcacatagaataaattgaaagtcttagatgaaataatggctcaggtctttccatgagtttttgcactcacagatgcctccatgtgtgatctcggccagtgcttattttcttgcagtctcctcttcaacactgtacttgggaaactgactgggccttctgtctttctatactcaggccttgtgcaatggtggttccagactttgaattgatctgtgaaatcatgctggtggcagaaggattcattgaagcccagtcattagccagaaagttcatcactctttaccagttgtgcaaagagcttctctccaaacaggtaggatctctagggaggctgtacaaccaagcaccgtgcaacagccccagctctggaaaagttctggaacaaatgtattaggaaaacatactcaagctttctcatagaaagtcactgtacccataagcatgtcgaaacctctgaacacttccatattaatgatttatgttcacttttttagctctgcatttttcaaaattaacctcaaaactccattttgtaatagaatacttagcaacacatcacagacaccagcgtcccatgagagacattacagtggccaataaaaacccctggaggaaatggtctgtacctgaaggggcatagatgaggagggttagggaagcaggttaagtgttaaccagctttgagcttctcatagttgcttggcgttacctgtagcttccacctaaggcaggaggaaattcacagaaaaattgcaccttagcaaaacattacctgcaaggtttctgccttgaacggagaatttctttttgtcaaggatagatgaccaagcttccctgggctgtccccaatgagctttgggattatcttgttttgatcacctttactgccataaaacaggctctctcagccatgtggagtctgtccaagatgcagaaaatcctgttttcctcatactacttttctcattgtatcccctctctaggttctttcccaacgttgacttccacttttacggctttatcccaaacctctcttctgagctctaaacctgtacattcagtgatctgtaccacagctcccccgagtgtttaaaaagctcctccagctcagcatgtctaaagctgatctccgtcagctctaagcccaagcttccttctcctgtgttcccagcctcagtatgctgacccctcattcactcatttgctaactctaggaccctgggagttaccctggaccatttcctcttccttagccctatatataattttaaatgaacccttaatgattctatgttctggatatttctcagacaagtctcatttcctttccctattcattgctaccacttgagttccaagcacccatatcttttgcttaaactattgcaactgcctttctactagtttttccacctctcttctaattcctcagatctgttctttagccacttgctagagtgattatttaaaaacgctcctcactggtcccaagatagagaccaatgtccttatcactctctgctaaatactgcagggtgttctgtctcctcctacctcaacagcagcggctcacagctctctccctgtcgtgtgatgctccatctccattgatcttttctgagttccttgaaattgattgtcttctcacctgagcctgtggacatcctgttctcacttgccttgactgcacttctttttcgtctgtgcctgactgaattctactccttcaaggtcttctttaataccatttccttagggaagtctgatccatatcctgggtacagccactgtgttctttgtcatcattgcatagcacatttttccttggctgcattttttttttttttgagatggagtctccctctgtcgcccagggtggagtgcagtggcgtgatctcggctcgctgcaacctccgcctcccaggttgaagtgattctcctgcctcagcctcctgagtagctgggataacaggcacccaccaccaaccccagctaatttttgtattttcagtagagacgaggtttcaccatattggccaggctggtctcgaactcctgaccttgtgatccacctgcctcggcctcccaaattgctgggattacaggtgtgagtcaccgcacctggcctccttggtagcatttgtcatggctctaattaagtagcaatctgctacaaatcaagtagaggagcttgggcttcaacagaagtctgtctgagttcagactccgtgctctgttctgcccactacagctccttcccacaccatgctgccacctgaagcctagtatcagcagtgtggtccactctcccacagaccctactagcagcactgtgaccagggggttcatatttgacagaacccactttaaggagctcttctttaaacctcttttcccatagaatgtgaaggcctccaaggtggcacatgtaagctcagcgtctaccatctctaagagttaacatggctccctccttgacagcccttccaattctacctgctgagtgtgcaaggagtagccagataggtttgaaaatggttctgtttgatctctttgaccccccacatcatttgtatgttctgtgtctgccctgctgtcatcacaactggaaaagtagcaagtgttagaccaggaactaaattctgggatcatcattttctaagtcatcccttcccacgtctctgtccaggcttcagaggtgacctaatgctcatagcatatctatgattctgcagacactcaccccagcacatggtgttctgtctctctgtcactttgatctaacactgcccacaggatcactacgactggggcctacgggccatcaagtccgtgctggtggtggcaggatccctgaagagaggagaccctgaccggcctgaggaccaggtcctgatgcgctccttgcgggatttcaacatccccaagattgtgactgatgacatgcccatcttcatgggcctgatcggggacctctttcccgccctggatgtcccccggaggagagaccccaacttcgaagctttggttaggaaggcgatagtggatctgaagctccaggctgaggacaactttgtgctcaaggtacatgtggtttttcctcccaggatttctctatctcttacttattgtccaggataatgggttatccttcatccataatccaaagggttgttttagatgtacaaatatgtatctagttagtaataactcaattcatttcaaccactcttaactggggacccacaatgtggaatgcatggtagggaatacaagggaaagttggaggatccttactttacagcccttccattctgtttggtgtacctcagcctgaatgccaactatctgctcactcacccataaatgaaaggacaaagacagaggccaagatctggccacatctacagaacctccactcaatcctactatcctggatagagaccagcaaaagagaacacccaaaaccagcagaggagaatacccctcccagcctcctggaaaacacagcacagctccttatttaaccttgaggcttaccagatattgaagaaacccgacaacacgcaagataaagacagatggacagacacagacacacacacacaacaaaaacagccagtgaaaataacaaagagaatattcttcaagttataattagcgtctttgaaggaaattttaaaaaatgatatccatcaaacaagaattagatgccattgtacaaagaaagcactattggagaattataaagacctcttttaaatgtaaaattgtatcatctatggcattcaaaattcagtgagaggatgggaagataaaggcaacatcccaggataaagttataagcagtattatgtattgtgtgtgtgtgtgtatggtaaaatattcacacatgcacacacacacagatacagaaagtgcgagaggtgagatgatgtatagaggatcaatttaggttatccaacatgttaccagtaagaattctagaaaaagaacagaaagataactagagctggaaagacatgtatccacattggaaagacagtactgaacagaatgacttcaaatgaatctgtgcagtgacacatcataatgcaatttcagaggtcaagagtcaagagaaaagaataagtctcctagttgagtgaggaggtagtactagtgtattaatacctgagactgggtagtcaggaaagaggtttaattaactcacagttctgcatggctggggaggcctcaggaaacttacaatcatggcagaaggtgaaggagaagcaagtccttcctcacaaggcagaaggaaagagagagaaagagtggaggggaaataaagagctgcagacaccctttgtcttccttgcacagtgcatttttcctttgtaacatttatcacagatctaattaaataacaatctgctacaaatcaggtggaggagcaagggcttgaaatgaagtgtaagatcagactccatgctctgttctgcatgctacacctcctccctgcaccatgctggttataaaaccatcagatctcgtgagaactcactcagtatcacaagaacagcatgggggaaactgcccccatgatccaaccacctcccaccagatccctccctcgacacatggggattcgagatgagatttgggtagggacacaaagccaaaccatatcaacaagtgatccaggaaaggaatgaaatttaaaaggagctcagaatctcttgtcagctaaattggatatttgagaataagaaaagcagtccttcaaagtttttaagggaaatgatttcaagactagaattctatacaaccaaattatcatccatgatattctcagactcataaatgttacttcttatgcaccctttttgagtaagttacttgaggacatactacagcaaaacaagaatgaaaaacaagaaaaatattgtgagattcaaaaaaatcaagaatcaagaaaaaaaatcctgaaatgacagccgttagcaggcctagaaagcaatcaattcaaattagagctggaagtcagtagtctcccagaaaagagaaccttaagaaaagtgaatttattcaaagcaagaatagagtaataagctgaaagttcttatgtgttttattgaacttctaagttgtggggacttgtaagttatgtgtacaaaatcaattgttccctcctctctgtttccacagcaccttataaatacctctaagatagtacttatcctcttaccttagaataatttgtccacatgactttcttctccatcacactataagatcacagagggcaggaggatcacatctgaatccccctcgcctggcacactctgtagcacttggttggtgactaataattatataactgaatgatgaatacaggaacaaatgaatcatgttgcccctatatttcagacctcctgacatcttggggtagataactcttcctctgttgacttcaggtctcacttcagacaccagctggggtcacagaagagcagttgggatgcaggtgagtcacaggctggtccctctggctgaatttcctgcctcctcaggtggtccagctggaggagctcctggctgtgcggcactctgtatttgtggtgggtggcgctggtaccggcaagtcacaggtgctgaggtccttgcacaagacctatcagatcatgaaacggcgccccgtctggactgacctcaatcccaaagcagtcacaaatgatgagctctttggcatcatcaatccagccacaggagaatggaaggatggtaagagtgggattctcccaggagaaagtctctgctagcctcagagtccctgtggcgggcttggatgcagttgggtgaattgcagaagcaaacattggactgatctgtttggaaccgcggagggagacaaaaaagccagtagaaagggagaaaccaattttggcttgcaggggaacttcagtttttcagatattctccctccttggggacctcttccagctgccttttagagagtgcatttaaagaggataaagctggctgggcacagtggctcacgcctgtaatcccaacactttgggaagcggaggtgggtggatcacgaggtcaggagttcgagaccagcctggccaatatggtgaaaccctgtctctactaaaaatacaaaaaaaaaaaaaaaaaaaaaaaaaaaaatcagctgggcgtggtggtgcacatctgtagtcccagctgctcaggagactgaggcagaagaattgcttgaacccgggtggtggaggttgcagtgagccaagatcgtgccactgcactccagtctgggtgacaaagcaagactccatctcaaataaataaataagataaagcaacataggcattcagctgtagttcactgactctggagtatgagccgtggtgtagagtgttaatgctgcctggcagtagacttcaagtatgtgttgggtagggaagcccacggctcattcccaaagaagtggtgcagtctggcatcctataaagggcacgactcccctatttgatgttgccccagcagtgatggggaagctgcatgctacagaaccttgtgcgcatgccaggcccctgatgattatccattcaatctcaagagggcccctagagccatattcctttctacagtgattcagaggcccccaaccctgggtgctgatctcagccttaccttcaaagaactaaacttcaccaatagacattgtaaagggtcgtttggcactggaggacagcagaaaagaaagttgagggggaaaaaaagaggtccttgagctgataaggaggacctctttctaaaacctatgtagcttctggaatgaggaaatctcagctccttcctgatgtttcaatgtctgaccacatccgggtcaaactctctggatttctctaatttaggagctttcatctgaggtctagaacacaaggatttaacaaccagagtctaatttttattttgctgttaatgagacttagcatctttccttcttattgatcttagtaatttgctcttttgtgattttatttcctgtttttcttaccaatttttaagagggtttttttttgtttttttttttgttttttttttttttttgagacagagactcactctgtcgcccaggctggaatgcagtggcacaatctcagccgactgcaagctctgcctcccaggttcacgccattcttctgcctcagcctcccgagtagctgggactacaggtgcctgccaccacgcccagctaattttttgtatttttagtagagacagggtttcaccgtgtcagccaggatggtctcaatctcctgacctcatgatcctcccgcctcagcctcccaaagttctgggattacaggtgtaagccaccatgatgccaggccaagagttttttaatatatcaaagatattaaccccttatctgtcacatgcattgctaatgcttccccaacctattctttgtctatagacactttattctcccatgctctttttaacaaaggaaattatgcctgtctagtctttttagcatctgggatttctattagtttataattcttcagctgctgatctagtatcataaatttggtcaaaaaagattctttttacattaacattttttatccatctggaatttatgttggggcttagtatgaggcagggtacagaatcaactttatttccttctagatggataattgattgtaaccgtaccatttattaagtaaactatcctttccctctgaatttaaacaccagcttgtcatttactaaattgcatatgtatattgagatctgattctgggctttctattctgtttgactcacctgtttatctaatcctatactaatgtcattttatttcagttacaatcattttataacatattttaatatccaatgaggtaagtccctcctcagtaatcttttgtaattttattgtcttgtctcaagcacttcttttttcatattaaatataagctcaataatataattcaaacttttaagtctgaattctagttaaaattttattagatttatacattaaatttgggaaaattgacaagatataataatcacaagtctgtgttcactgaacaaggtaacttcgaagtaaatggaacatagcctttaaaatatgtttaggggccaggcacagtggctcattcctataatcccagtgctttgggaggccaagatgggaagatcatttgaggccaggaatttgagaccagcctaggcaacatagttgagaccccatgtctaccaaaaaaaaaaattttttggataactttaaaagaatacaaatcaacaggttattttagttttatttatttatttgttatctgttttttattttcaaaattaattccagtaaacagaaaaataagtacataaaggaattggcaattatatcaccaaactcaatataataacaaagttatagaactttttatcccataaatagaaagtattcctttcctgattggttcatgtaacatttccaaaaattaaaaatgtaattggctacagagaaagctataatgaattcaacaatatcaatttacaggtcacattctctgataataatggaatagaattagaaacaaatagcaagaaagtcaccaaaaatgattttactacttgcaaatcaagaaatgctctcttaattcctgtatcaaaaaggaaatttaattgcaaacctctctaggatgcaataaaaaaaatacttcatacaagaacacctatgggctccatctaaaacctctaagggaaaactttttaaactcactttattataaaaggtaggctggaagtaaaggaagttaatattcatcataagaaattgttcaaactaaacacaaagaaaatgacggaaaaggaactgataaagataaaagctgaaattagtcactaggaggaacacaaacagattatataaaagataaataaatgtaaatattggttcgctgtaaagaccaataagataagtctattgtgagagtgattaatgggaaaaaagagtaaatatacatataatttggaattaacagacaagagtaaagtagaagaaaatatttaattgatgacacatacttgaaaaactaaaagaaataaatcaacccctagcaaaatataaattaataaaatttcttcattaagaagtagaaaaattgagtaaactagtgaaaagaaaaagttaaaaaagagtagagcaaaaaacagataatttcaaaatcatgaaaagataactctgaaattatcttacagagcaagaataatattaatatcaacttttatgtggagccaaaaaaacccaatgttactcattaatatagacacaaatattctaaataaaatatcagtaaggagaatcaaacagtatctcaaaaataataccctttgaccaagtaaaagctattccaggaatgtagggatagagcaattgtttttaacagtattaacataaaacattaacaaactaaaggggaaaatcatttgatcactaaatagatacttaaaatgcaattcattcctaatagaaaattctaagtaaagtaggaatagaaggaaacccctaaaatataataaatgctctgtacctaaagctgaaatgaaaacaaagtcattctgaataatgatacagtaaatttccatgaaaaataaggaacaagttagggatgcctattgtcaacattattgcttactggggttctagaaaatgtaataggacaagaaaatgaaatagatggtataaattggaggaaagaaaaaaaaattagaggaaaggagagaaattattgtgttgtttattatgcaactttatacctagaaaatgtattagacattactgaaaaattactagaattaataagaaagttcattaaaggcaactgaacataaaataaatacacaaaatttggtaacttttctcaatactggcaagagtcaattaaaaatagaagtgcaggaggagaaaattcttttcacagtagcaataaaaatcatgagatatttaggaacacatttaaccaaacacatatattttaaaatctgtaaaaatgtattagggacataaagccatatgtgaataaatgaacagacgtaccatactattaactagggaagtttaatatcataaaaatcaattctgcccaaattaatatataaatttcaggtaatgacaattagaatcagatgggccgctttccaaagcttgtgtttggcaagattcgccaagactgcaattacaaagcatgaaaactctaccttaaaaagtttaatgtagtttcatcatgtcatagttacttgctgtaatgatccactttgtcacttaaaaagcttgtactatcaggagttgttcttgttcttgttaatgttatgaaaagttagactaaagcacagggagaatgcaccttgggcactgccaggtttttgcaaagcaagatataaaaccagatctgcatcctggccagcatggtgaaaccgcgtctctactaaaaatacaaaaaaattagctgggcatggtggcacgcatctctagtcccagctactcaggaggctgaggcaggacaatcgcttgaacccaggaggcagaggttgcagtgagctgagatcacaccactgcactccagcctggcaacagagcaagcctccatctaaaaaaaaataaagtaaaataaaataaaaataaaaccaggtctgatctgcctttgcatgttccatgtacgcccccttctgtgtgttgtagctaaagggggaaagctgtgtttaagtgaaagaggattaatgaagaaatggaaaataaggtgtcagtggttccttttaggattgttctcttccatcatgcgggagcttgccaacatcacccatgatgggcccaagtggattttactggatggcgacatagatccaatgtggattgaatccctgaatactgtcatggatgataacaaggtatgaaattgggggatatccctagatcatttctaatcacctgtgaaaccagtcacccagtgtggcaggcatacttgcaaatctagattccacatgatggctggctcagagtaaggaactatcatcagcatcttcaccacacatctctgcactgataaattcccagcagcaacttttgcttacatcaatggtactgccatggctcacaccagttttggcattattataatttgcatcagaatgttctgcacatagactctttagtatttagagttcaaagcagtcttaagtcattcattcacatctttttactttttctttttatgctcttctagaataaggatattgaagatcagaaacattccaagcctgtcaaacatctttcatggtgtcaaatattgttccattgagaggctattttattttttataaacaatgaaacctctgtagtcccagcaccctgggaggccaaggcgggcagatcacctgaggtcaggagttcaagaccagcctggccaacatggtgaaacccccatctctatgaaaaatacaaaaaattagctaggcgttgtggcaagcgcctgtaatcccagctattcaggaggctgaggcaggagaattgcttgaacccggaggcagaggttgcagtgagccgagatcgcgccattgcactccagcctgggcaacaagagcgaaactccatctccaaaaactagctggtggctgttaagctggtagctgtttgtaagcttgtttagagagcatgtccagattacaagttttaaaatgcctttaacgtttacaggattgttagaataaaagtatgctctcctggagagagtacttgattgttttttccacttttattttaggtttgagggtacctgtgcaggtttgttacgtaggcaaactcatgtcacaggggtttgttgtacacattatttcatcacccaggtactaagttcagtaccaatagttacattttctgcacctctccctcctcctaccttgtaccctcaagggggctccagtgtcctgtctgttgttcccttctttgtgttcacgagttctcatcatttagctcccacttacaaatgagaacatgtagcatttggtcttctgttcctacattagtttgctaaggtaatggcctccagctccattcatgttcccaaaaaaaaaaaacaaaacatgatctcattatttttatggctgcatagtattccatggtgtgtatgtaccacattttctttatccagtctgtcattgatgggcatttaggttggttccatgtctttgccattgtgaagagtgtggcaataaacatttgcgttcatatgtctttatagtagaatgatttatattcctctggatatatgtccagtaatgaaattcctgggtcaaacagtatttctgtttttagcttttgtggaggcaccataccgctttccacaatggataaactaatttacactcccaccaacagtgtataaatgtgttcccttttctccacaacctcaccagcctctgttcttttattgacattttaataatagcaattctgactggtgtgagatggaatctcattgtggttttgatttgcatttctctaataatcagtgatgttgagtttttttcatatgctttttggccacaaaaattgtcatctttagaaaagtgtctgttcatgttctttgtccactttttaatggtattgtttgtttttttctcataaatttgcttaagttccttatagatgctggatattagacctttgtcagatgcatagtttgcaaatatttttcccattctttaggttgtctgttcactctattgatcatttcttttgctgtcagaagctctttagtttaattagatcccatttgtcaattttgcatttgttgcaatggcttttggcatctttgtcattaaatctttgcgcattcttatggccaagatggtattgcctaggttgtcttccagggcttttatagttttggattttacatttaagtttttaatcctcttgagttaatctttgtatatcatgtaaagaagggcgccagtttcagtcttccacatatggctagccagttatcccagcaccatgtgttaaataggcttccccaaatgcttgtttttgtcagctttgttgaagatcagatggtcataggtgtgtggccttatttctgggctctctattctgttccattgatctatgtgtctgtttttgtaccagtaccatgctgttttggttactgtagccctgcagtatagtttgaagtcaggtaacatgatgcctccagctttgttttttttgcttatgattgccttagctattctggctcttttttggttccatatgaattttaaaatagttttttctagttctgtgaagaatgtcattggtaatttagtaggaatggcattgaatccatacagtgttttgggcagtatggtcatttaatgagtttgattcttcctatccatgaacacgggatatttttccatttgttcgtgtaatctctgatttatttaagcagggttttgtaattctttttgtagggatctttcatgaggtactactataaaaggaacagtattaatatgaaatgtaagttcttttcctttaagagttccattgttccaatatagtctagttcattcaaatcaccaacatcaacttaaactgtttaaataactttttttttctgactcaacacacatacacacacacacacacacacacaggggtggtggtggagagtgcataggaagaaagaggattattgtagaaaatttagaaaatactattcatcacaaagaaggaatatattagttcgttttcacactgctgataaagacataccagagactgggtaatttataaagaaaaagaggtttaatgaactgacagttccacgtaaatgaggaagcctcacaatcatggcagaaggtgaaaggcgcgtcttacatggcagcagacagagagaatgagagccaagtgaaagggatttccccttataaaaccatcagatcgacctggcgtggtggttcaagcctgtgagcactttgggaagctgaggtgggcggatcacgaggtcaggagatcaagaccatccctggctaacacagcgaaaccccgtctctacaaaaaatacaaaaaattagctggacatggtggcaggcacctgtagtttcaactacttgggaggctggggcaggagaatggcatgaaccctggaggcagagcttgcagtgagccaagattgtgccactgcactccagcctgggtgacagagcgagactctgtcaaaaaaaaaaaaaaaaaaatcagatcttgtgagactcactcacaaccatgagaactgtatgggggaaaccactcccatgattcaattgtctcccactgggtccctcccacaacacatgggaattatgggagctacaattcaagatgagatttgggtggggacacagccaaaccatataaaggaaataattctccataatcccaaccaaaccaataataatcagccaaatccccacaggctggcaaggcacctccctccttcctcactggcatgcccttccctgttgtctccaggtgctgacattggccagcaatgagaggattcctctgaaccccaccatgaagctcctctttgagatcagccacctgcgcacagccactccagcaactgtctctagagcaggtacggcccaagaagggaagaaccacaaagctactccacttagggaggtacctctggcttcacacgtagttttgctggctcagaaggaatctccacatgggagccagaagcctcacgtgcagttttgtgaatttggaaatgttgtggtaataagaagggaaatggcttttgagctgcacaactatcctctgcacagaagtgtctaacttaggctacttttaggccagttctagcctccacgtcaatggagatgaccaaatatcactgtttatcactaactcctggtgcaaaattgcaactctatcccttaagtttcatctgtctccactgaacaaatttattaacagagactggaagattttttttttaattgtgtggcaaaatcaaacttaaagaagcagggagtagaatgtcagttgccaaaggtgagggttggggggcaggggcagatgttggtcaatgggtacaaaatttcacttctgcaggatgagtaagttctagagacctgctgtacaacacagtgcctatagttagccatactgtagtgtgcacttaaaaaaattgttgggccgggctctgtggctcacacctatcatcccagcactttaggaggctgggttgggcattctcctagcttttgagaatctctctaggattctcaaagctgctccccatccatctatcatcagtccgctggagttggtcctcaatagcaaacccatttacccgctcacatcttggccaaatctccttttcttttcagtccagtcttctgtacattttccaaacagagaaaataactccctggggtgaaaaatataatgatgtatatggaatattcactaaactgtattctctgtgctcacagggatcttgtacatcaacccggcagacttgggatggaaccctccagtgagcagctggattgagaagagggaaatccagacagagagagccaacttaaccattttgttcgacaagtatcttccaacctgcctagacacactcagaaccaggtaggccaagaaacaaggaagatagagagttaaagcagcaataaaaagcccatgggttcacacctagtgtcctgctgatgttctgtcctgtcccaaagtcagatgttcccagagcgatctcctccaggcatggcagatggcaaaggggacacacattaggatggccatgggatgcctgttgtcagctcaggcatgaagtgaggtgagtgaaggggaggaagattgaaagtccctttcgtgagtgccacgtggatgtatgtgaaggaggctgcgggttgtagtatcagattacaatccagacactcagatccttctgtgtacagggcaagcagctctgcatttgtaataagtaatccataggccagatcaacagacctaggggtgaaaatggcacttattggtgacctgtggggcccactccccgtccctggctgtgtgtgttcacggcccagataatgtgggtataatgtaccatctgacagtcctgccctgctggatatggtgagtttacttttcctcttataggtttgtaaaagtaagagcaacaagccctgaccacttatcactaagcaagaggttaatcactcttgaccaagaggatacttactacagcaagaatactatctgtgtcagcacagggagctgcccatgtttggaacctgcttttgttttacactctttttatggttgttgttgccatttgatgcatcattctgtgaatctgacacccatccctgtagtggaggcaagaatgggcccctgaggctggtgctgtgaaggcaatgtgactcagagccccatgaagatgccacaatttagggtcaggattatgtttcccggaaactaaagtccatcattgaagttgatccctgcctctttcttccttggcttgtcaagcatgggatatgattgtgcctccaatggtttgcaagcatggaggccaaggggaagggagcacttcagactgcaggaaacgatactgcaacagggctccaggtgctctcattccatatgccccgccccacaccctgaaaaatccactcacgttcaaagtgaattttgtatacctaaaaattgagttgcagtcaagtaggtgacattgtggtctattttcgttgtttaatgaaacattacttttgatttcatagtttttctatttcagggtcaataattattattccaactcaacatttgtataagcctttgaaaggctttcagtccgtgggtgacccatgggctctgtggccttgggatgtaatgggctaaagcagcccgtgtagctaaaaaagtctggaagtggaaaacagtagttaatatcacagatggactagggcagccaagagttagaaaaccagagaagggtaaggttttaggaaaatagtctatccctgttcttttttttttttctttttttgagttttaaaatgttttttaaagttttatttgtatagatttagggatggaagtgcagttgtgttacagggatatatggcatagtggtgaagtctggccctttagtgtagccaccacctgaatagcatacattgtatccaatgggggtatttcaaccctcaaccccctgccaccctcccaccttttggagtctctggtgtttattatttcactctatatttccatatatacctactgtttagctcccacttataagtgagaacatgcagtttttgactatccattttgcggtcattttgctaaggataatggactccagttccatgcatgttgctgcaaaagacatgatttcattcttttttatgactaagtagtattccatgtgatatacataggtatatatacacaccactttttttttttttttttttttttgagtcgttgtctcgctctgtcacccaggctggagtgcagtggtgcgatcttggctcactgcaacctccacctcctgggttcaagtgattctcctgcctcagccttctgagtagctgggattacaagtgtgcattaccatgcccacctaattttttttttttttttggtcagagtctcgctctgtagaccaggctggagtgcaatggcgtgatctcagctcactgcaacctctgcctcctgggttcaagctattctcctgcctcagcctgccaagtagctgggactacaggcacgtgccaccatgcccagctaatattttgtatttttagtagagatggggtttcaccatgttggccaggatgatcttgatctcttgaccttgtgatgtggccgcctcggcctcccaaagtgctgggattacaggcgtgagccaccgcacccagcctaatttttgtatttttagtagagacagggttttgccatgttgaccaggctggtctcaaactcctgacctcaggtgatccgcctgcctcagtatcccaaagtgctgaaattataggtataagccactgtgcccgcctacaccaccttttaaattcaatcatccattgatggaaactcaggttgattccatgacttcgctattgtgaatagtgctgcaataaacataagagtgcaggtatctttttgataaaataatttcttttcctttgcatccccgttctttaggattttcctgagacacttgtcccatatatcctttaactaaaagtctgctatttctcactctgggcatttagaacaagagatggcaagctcatgtgtctttgtttgtgcatgtgtgccggtgcatgcacaagcctttgaaacagctttgaatattctgactgtattaagtctatccagaggcaactctcccccgaactctcaattatgggtgctcactctgggtgtaatgtcttttgttgttagttttttttatttttattttttttttgagacggagtcttgctctgtcgcccaggctggagtgcagtggcgcgatcttggctcactgcaacctctgcctcccaggttcaagagattctcctgcctcagcctcccgagtatctgggactacaggtgcatgccaccacacccagctaatttttatatttttggtagaaacggagtttcaccatgtttgccaggatggtctcaatctcttgacctcgtgatctgccctcctcggcctcccaaagtgctgggattacaggcgtgagccgccgcgcccggcggatgtcttttcactctcacagccaccctgcggatgggggagctgcagctccgcgatgctcccctggcatcatagccagttagtaacaggcacttgctttaaagccttccttctattttatacagtcacagtgttgtaatgccagcttcatgtggccctgtcactacgaagccgtgtcatgtcaacagataataattttttattgaataagcaggcccataaggggcaattataaagcagctttattttatttcctactgttcctttaaaaccattgtatgtgactagttcttctcctgaccctgcatgagatctaggtcaaggtctatgacttttctgtaataaaaaggcatctgatcacttctagtcacacagtcatacatacacatgtgtgttagtccagtgaaaatataaagaaacaaactccattcataatggaggcttctgccccacctgcctcagctcaggactgcaatgggaaagaggcgtgtttttgacttctctcctttatctgccagtgaccagctccctggctatgacttctgacccatcgctgtaaaagcggggtggagagaagaggggaaatccgacttctctttgatagtttttgggagctccttggctcctccccatcactggaaatctttcatctgttattctggaagaaagaaactgcttctctagctggtcaggtcccgctcccacacaaaccccatctgcctcaccttatcccttagccaagcactcagacaacccctgctgcacacagcccacacctggattccaggagatgcttgccccttctctgctttgacaaactggagcacaggctgcccctgcaagttacctccccactctccactgggagatcagcaagtctcgggggttttccaggcaagagtccttcaccaactcggagtaaccctattgaagcccctttccctggctattaggggaaagcagctaccttccctgtgcaggaggggacactcattgcctacccagagctctctctagtactctgattgctaatttccaggccttccagcctttccactttgtcctctgtactcttgagagggtgagaagccagggttgcaaaaccctctgcgagtcccacctaagttgtctagaatctctgtttggaatggaagggcagttggcacctatcctcttggtggcatatccagcactgagcccaagagagttgtgttatatccgtctgttacaaatacacatcaaacaaatgagggaacacccatcaaggagtcagtcttctcgtcactcatggaagtaatacctagattactagactctaaaactgtcatagcatttgttgtaagaattgcaattagattcaaaaccagcacaaatgctaaaaagtgaatggcgtgctgtgcagctctcaggttcagtgctgggaaatgactgttaaggtgtccattgacagtgctgtatttgttatgaaaacggactctgcctccatgctgcctatgaacacttcatcctgtgggaggtggcaatgtgggctgagtgtgtgggtacgtggtgtgctctgcatatacatgtggtgtgatgaggatacctatgggaagaaaagtatgtgtgtgtgagcttgtgcatgctcctgctgcatgaggcataggatgtcttttgtgcatctcttgatatctgcctttcaattaaggcctctaaagccaagattaaaagtgcaaacaccaggccagggcagagttacagaggtgtattttcagttgaagaactccattcagttcatcatgattgtataaaataaccatctgtcctggtccactctacttcccagataagatcctggccccagaaaaagtgtttttggtgttttcaatggaaggaaacctctgaggtgaagaggtagaagggcaagcctcagaaatgcaccaaaattgcctctttaggtgcgtttttttttttgtttttttttttttttttttttttttttgagatggagtctcactctgtaacccaggctggaatgcagtggcccgatctcagctcactgcaagctccgcctcccgggttcacgccattcttctgcctcagcctcccaagtagctgggagtacaggtgcccgccaccgtgcccggctaattttttgtatttttagtagagacggggtttcaccatgttagccagaatggtctcgatctcctgacctcgtgatcctccctcctcagcctcccaaagtgctgggattaccgttgaggtgctttttgacaattgcagaaagtgtgaaatgagcgaaaaagttacttgttgcagccacctgtgttccccaggtactgagaggggatcatcaacagaaagagaagagggaagaagaagtgggagggggagggtgtcagaggaaaggagatgagaaagtcctcaggagagctctgggcccttacttccttacaaaggaagctggcgcgagaacagctgatgagaataaaggcttaagtggcgctctggttgtctgtaatcccaaagaacttgacggaccatgagtccactgaaactgagtggttccatagctgtccaacagcaccaccagaatggaatatcctctgtgtttcagatcccctcgggtctctctttgcaggtttaagaagatcattcccatcccagagcagagcatggttcagatggtgtgtcaccttctggaatgtctcctgaccacggaggacatccctgcagactgccctaaggaaatttatgagcattattttgtgtttgctgccatctgggctttcggcggagcaatggtccaagatcaggtaaggagatatgttgagctcaacaaccacactgaagtctgtagcagcaaaaactgatcctttagcaaagatttggaagacaggacagctaaatgtcagaatggacttgaaagcagcaaactatttagtcatctacctattactctgctaaagacatcagttgtcctagccagacctcatagggtgagatacatgaggtcgtggtgtgttcggagcttttcctttttgagctactgaacatatctttgatttcttgggaacttatacagtgtttgagtttgaacaactgctggtatatatgcactactttgccaggtggtgtgtttgtggagagaggggtggaaggaggctgtgccgtggaagcttgagtggaaggaaacccttcagttttcttaaaaacctctagaacaaggatgtaccactccctaccaggccagagttaactatcatatctccatacgcgcgaaactcaaagctgtccagagaaggctggaccaaagtctaattagcatctaggattggaaaaccaaagtggaatttatcttatagtgttgactgctatagtctcatgttgattggaagaagggatatgtggcttggaatatccttgcatcctgtcccccaacccttcttgtattcccagcatttttctttacttatttttctccaaataaaagatattttatctagaaagaaaaatattcaatattatgcaaaccagtctcctataactgactctagctattaggcattattgtatgacagttaagaacatggactctgttagcaaattttaagtatacaatacagtattgttactataggaactttcctgtacagaagatttattcatcttgaacttaatcatttttataaccaaaattttgtaccctttgacctataccttccattgctccctcccccagccactggcaacctcaattcctctctctgcttctgtgaattgactattttagctgtatcatgtaagtgatatcatgtcagatttgttcttctgtgcctggcttatttcacctagcataacagtctccaggttcatcacgttgttgcaaatggaaagatttcctttttcttaaaaaaaaaaattgcgaagagggaagataaatcttacatcaaatgttcttagcacaaaacaacaataacaataacaacgataaataagagcatggaagggaactttgaaggtgatatgtaggtttatgcatagattgtggcgatggtttcacaagtgtatacttttttccaaactcatcacatcatatgcattaaatatgtgcagctttttgtatatcagtcataccacaataaagtgattttaaaaaatagctgagaaaagcaaaaataaaagcaaaaaagaacatgaactgtggatttgaattgtagctctgccactattatctggggaacgttaggaaagtaacttaacctctctctaccttactctccccatgtgcacaaagaatgatcataggggtacccagctcctaggagggtggcgaggactaagtgaatgcataatgttctaatcactcagcatgaatacatgcaaggtacttagcacaacccatgggtgcttattattactattcttctagtaaaaatattcagttctgtagcacgtatctggtgtctctcttgcaacaggggatcagaccaagctgtaattgttggaaagttatcatttactcttctcagtctggattgattgtgagcctctttcaaaggaaggtagaaagtttcagcctcccaaggcaaaaccatgttctagaaatccaaaatgaaagtgaacttggacaaaaaagaatttgcaattaacttctttttcattttcaagggccctggctgttaacatccgtcctaccaaccatcactccctgatgtgttctttggtgctcaaaattcagaaagcagctctcgcaggctctcaggaagtgcacctttctctactgccctccccagagacagatgccctggaggcagaaagggaagtctccaaggacaggaggatacatgagccaggagtttgacatctgagaattttctgctgtctgttctgtagtctttggagcttctctgtggactactcctttgacagctttacatttcccctttgaggcaaggaggcaaagatttcagcaggatggatgagacctggctgaactgcacagagatcccgaatgcataggtttaattgctccccgtcaaatgcagtctctgacctgtgggctgggaaaacgtcagacagcgactgctgagctactctctcatattggtggtgcgcaggcagtggagtatcaggatgaaaatatgtgatcaatttttctaactctgggtataaaaatttaaatcccctcaagccttttaaaagccccggagaaagcatccctccaggcgtcctgcgcactggagcacttgaagcaattgacagccctgccagcaacctgggaagaggacaagggagaaagcttttagcagcagggcacatcccagacccctacactgcctgcattaaaagctaaacaccaaaaatagtgctgtcaataggaaggtaggagtttggtcaaaatattcacatcaggaacagcaatggtgcttacattgaaaaaaactgtcataaaagcaaagcagaaatacaaaatggaggctatacctgagtagaagttcccatttaaaaaaaaaaaaaagtcctggctgaataccttgcagcccttagagagaacaatctctcggaaacgtaaggtagagaaaacaccagattgtgagactgacaacctgggttcaactcccaattctgtcgtttcataaaacccccactttataaaatgggagtgattttaagtaaccaggataacctatagcattgtgaaaatgaagcgaagtaacactgggttcccagctctaccacagtatgccagtaaagtcctcatgtcctccaggttaaagggcagagagaaaacagtgaactgtgagagcccaggggacatggggacttcagaagggaccatgctgaagagataccatggagtggaattaagaaaggatcattgggctgggtgcggtggctcacgcctgtaatcccagcactttgggaggccaaggcgggtggatcatgaggtccgtagttcaagaccagcctggacaatatggtgaaaccccatctctactaaaaatacaaaaaattagccgggcttgggcatggtggcgggtgcctgtaatcccagctactcgggaggctgaggcagagaacagcttggacccgggaggcagaggttgccgtgagctgagatcgcgccactgccctccagcctgggcaacagagcaagactctgtctcaaaaaaaaaaaaaaaaagaaagaaaaggaaaaagaaaggaccactggactggcccagcagaggtcaccttgactttacagtgtccaattatagtacaaggtgcggtcaagcaccagcttacaggaaggtgagacaatgtcggtgtggcccagccaagggcttagctgggaaattgccaggcatctcaaggcagcatcggggctgaggaaacaagacccacccttccttccttctagaggtggccttcatctcagagtttccatagaaacctaaaatctggttttcgtagaaagttgaaggtcttgaagcgtattatctaggagttaagaatgggggtttcctctaggcttctggttccagagaacaatattgggaagttataacgtccccttgatctaaattcaaatcagaatgagaacatcaaacaaatcttttcttatcttaccacccatttccactctcattttaaagcaaaagaattcaatcctatttatttaacagcaaaatgaggagtgcccttttttcgggtttcatagttgttaccatgtgcccagctccctggtctcttcagcctttaaactgtcattgtcctgccctccatgaatatttcctaaaatgaccaatatgggactttttttttcctttaggatttttcttagttcagtgtgtttaaagaatgggtttgccctcccaaagagttgccagtagtaatgggtatgttttgggtctgagtgtgtgtgtgtgtgtttggacacaataagatggtttgagtacactgggtatacagccccatgcgtaaggggcccattatctaataggtatgcatgcaaattatatgcttctacctattccttctgtcagaaaaaccagtacagctctgtctcccccactgctcctagattctaggattttagctcttgcaagaaccttggaaatctttccagaaacctcattttgcagacgaggagattgaggcatagaaagaaggatttgcctgtggttacctagctgatacccaaaccccttctgaggctcttctcactgcagcgctctgtgccccaggtgtcaagagtcaccattccattccaaccttaggctgccatcctgggaactgcagagaatctcaggcaccgaagaatggggccaatctacctcttcaggagttcttgattctcccccgtgttcttccacctccctccctcaaccatctccacccttcagtggctgtaagacatggcaggaccaggctggctcagccgcatggtcaagcaaggatgcctgtgcgtggcccctgcgtagtccggcttggtcagggttgacccttggggcagcgctgccttcctggaggagctggtctagccggcaggcccacacagggaggagcacgttgtcctgccctgaccttctatctgacgccgtggcctcctgtgtgggcttcttgagttctggaggaccttgtcccctgactgtctttgtttttgcagcttgtggactaccgggcagagttcagcaaatggtggctgactgagttcaaaacagtcaagtttccttcccaaggaaccatctttgactattacatcgacccagagaccaagaaattcgagccttggtccaagctcgtcccccagttcgaatttgaccccgagatgcccttgcaggtgagtgcagctgagcagccgaggacgtgcgtgcagttgccctcaaggatctgcagtggctccagtagcagccccgcatggctatctgagcatttgtccttgctaggaactagtcatccccagctccatgactttgcagaggagatgatgggtgtaatgaagtcacagattctactaaaggccaggacatttcctcaagagaggaggaaatggcaggggcagaagattttaaaatgcattagagaggccacagagaaagaggcccgggtggtagaggagagcggggaagctctctgcctaactgcggggagcccagagagtgagtctgtagaatggtcccactgtgaacatcagggaagatactcctgaccggtgcttatttggggagctccatcgtgacggaatcccctgttctgaaatgcttcggaacgccgctggtgcatctgtttctccctagagcccacccttggcaggcttattgtgctcccattccaggcgtgtttggtgcacacgagtgagaccatccgtgtgtgctacttcatggagcggttgatggcgcggcagcggcctgtcatgctggtgggcacggctggcactggcaagtcggtgctggtgggagctaagctggccagccttgaccccgaggcatacctggtgaaaaacgtgccattcaactactacaccacgtcagcaatgctgcagggtaagcagcccagggcacctggggtggggggcatctgggtggccgtgtcacctgacacagagctgaagccaagcgtcaggtgcctgcctgacttgagttctgcataccccagcactgcgcacttcctcccacacgccccttctcacctctccctacacacctctttctggctcctccagcaccccttagcactgcttctggtctttctttctacattcctccctggtctgttaaattcctcaagagcaaggtgttcaacacagagcagttcagcaccttgatgacaaagagagctacaagccatggagagatttgcaagaacttgcagacttccggcactgaaagtatctctagagatcatttaattcatctctcatatgttatgggtggggaaactgaggctcaggtaaaaggatgtgattgcccaaagtcaccaccaagtggtgaggcaggcatgacacatctggtctgactccacctggggcttgcttttccccggtgtttacacacagagctcccaaatagacatgggccaccggtgatgttttacccttgccagagtctctctccccttaactcatttacgacacagtctccttttttatggaaacaacacattaactaaaacagctttgttttggagaagcttccaagccattcttccaacaaaatgaggggagaggcagggctggggagaaaccctgttcttacttcccaaacaccgacagccttgtcccactctgttacttggtctgagctttcccaggtgacactgcagtgcctccccacacctagatatgagctgtttgcagctggataagttaggagccatagcttataatgtgaaaagtgaacctggcactctcgttatccgctacatcacccaggccttaggccagcagacttgcaaagcaggcttcgtgtgcaccaccacttgctctgccatgaccattttacccagtctttctgccatccctgcctggtgtaaaccagagtcagcccgcgatgttgcctctgctgacactctgctttccccagtgcccctgggggaattctttctgcaaagttttgccagctcttgtaggattagggtctagccaactcaaaatgctgatgggggggagcaccacctctgctctctgcccctcagagcagctaggtgcctggagcatgtggacagagattccggcttccccccacccgcccttcgatggcagagacttcttcacctatttcaaactcacctctagacttcatccactgctgagccaatcccaatccagcaactgactgtagttcagacatgaaaattaacaagtaagacaaaatgaagcaacaaagatttacatcagaactttactagtttgtcaaagatgtaaacatcttctattcaagtactgaaggaatcgttcttccattttttgtgctcttcacaatgtcacagcaacaagcatgacatacttttaagtataatctgtattattaacattttccttatattttcacaagtctacaaaacaaatcaaaccctggtttgtggtgtttgccaatttccatggtgtaaatactcccaccgtggccaattgtaagctaccaatgcaatgtcagtgaacaaggagtcaggaagagatacacagtagcacaccattataaacatttccacttcacagatacaatggatgaaaataacctccagtatacacatgatagtaaatgtcataaaatgtgatgagttttgaatatttattaccatgattttcaatataatttacttaattttaagtttatctatacctatttatttatttatttttgagatggagtttcactctttgtcacccaggctggagtgcagtggcatgaggcttggctcactgcaacctctgcctcccgggttcaagcaattctcttgtctcagcctcccaagtagctgggattacaggcacctgccaagacacccagctaatttttggatttttagtggagacagggtttcaccatgttggccaggctggtctcgaactcctgacctcaggtgatccacctgcctcggcctcccaaagtgctgggattacaggtgtgagccactgcagccagcctaatttattttttaataatggtcatgtttaacaaccagcttgcacaattcccttggtttcaataatcagctccaataaaccactggcttagtccttactccatgaagcctcaatactatcatatcttaaccttccatcaaggccgaagtcatcacatcagcacctggcagtggccttaagccgacttcacctgtctggctaatttaaatcttagcagttcgctgtctgcctcatagaattcctctttcttgttcaaatatgtacccttattttcaagccttgagtccaacaactgatcagattaccagctctgcccatttacctcaattcttactactgttacaactacactactactactaataataataataatagcaacaacaacaactgacatttatcaaagacttatcaggagtgtgaatctgacttagacttttacacttttctctttttttacttcttaaatcttgtacagccctgtgaataagaatttgtattaccttcattttatacatgagaaaactaaggcacagagaagttaaacaagctaccttatgacacacagtaagttggggagccaaggtttgaccccagagagtctgacttcagagcctgtgctcttaaccactaggctatactgcttccctgctaagaaaatactttgaaagctgcaataaatattcaacattattactattatcattaggagtactattcaagtattccagaggaatgtttttgtatttaattgattttctatttaaatgattttctatttaattttactaaatagaataataatttattctaaaattattaaaattaataatctaataaaattaaacagaaaaagtgatttaattctattaaagtggttttataatatttttaaaatatcctttaaatagagggtaaacatttggaagcaaggaagagaagatgagtttctcacactgccctgacctgtcattctcactctggatctctcacctagagggctttctccttccctcctgttagaacacagagaatttctttttttctttcttgagacagagtctcgctctctcacccaggctggagtgcagtggtgtaatcttggttcattgtatcctctgcctcctaggttcaagcgattctcctgcctcagcctccccagtagtgactacaaaaaaatctcaaaatgctattaaatagggccgagatgaaaactggctctcactgtagctgagcattcaccaaaacccaacactttctgtttcttgttaattccctaatggcctcttggtaacgttagatcttgaagccaaccctcctagcacactaagggatggagaaagctactgttccataacctctcctgtccagaggcaaccaggaattggggagtcagccgaagcccagagtagcagcatatatgttacaacattcatgcaataaagctcagatccttaactctgaaaaatgctgtattcccttatgggaacttccttcctcttgccttgttcacagtgcaaacaatcttgattatttgggcttcttagcccaagacattttaagagcaacaaaatggcagaagaaagggtgttaccaacgatttaaaaagtgacagctagaaaccaggtatcaaacaggaatttggagaatcagctgaatgtaagagagatgtgtaaactcaaaagacagctgctctagtatcattcaatgaagaggcaaactgttgcacctccttcatgaacccgttaactcattttgcagcccagtgtcttaatcgttatttgcacttgagaccctgtgtatttaagaaaaagttggatgtgaggtggcatagtctgcttgaaaggacagttagaacacccagacagatgtgcaaatttatgtttataatgtgtctgtaatggtaaaaggggagaaacagcctaattgtctgtatgatagaatactaagcaatgttggaaagaatgagaaaattctgtaggcactgagttggaactatttccaaaattttgttgagtgagaaaaggaagatatagaacagtatatatagcatgctccaaactgtatcttgtttaaaaagaaatatataaaaatttactcacttatatgattttttaaaatatatataatatatacacatacacataatttatgcttatataaaaacttagacaatctccagaaggacacaaaagaaacacagacagcagttgtccctggcaagggaaactgactgggtgctgagggtggaatagagaattatttaaaccttttatgtttaattataaaatatttcaaacatgtacaaaagtacagaaaacaatataacagatgccagtgtagcactatccagatttaacagatgctaaagtgttagcattatgctaaatggaacttagccttatgagtgcagctaataagtggggcgtggaggctcatgcctgtaatcccagcactttgggaggctgaggcgggcagatcacctgaggtcaggagttcgagaccagcctggccaacatggtgaaaccctgtctctatcaaaaatacaaaaaaaaaaattagccaggcgtggtggtgcgtgcctgtagtcccagctactcaggaggctgaggcaggagaatcgcttaaacctgggaggttgaggttgcagtgagccaagatcacatcactgctctccagcctgggcaacagagtgagatccctgccacaaaataaaataaaatagaattaaaaacaagtacagctaatacaccacccctgtcgctcctttctccttcctgccccttattaactagagtactaaactcaatgtgtatcattacaagtttacactcttgaaacaaatatgtagccataaaatacatagtgttgcatacttaaactttaaatttgccatactatacctttctttggcaacttacttgcattagtctgttctcacactgctataaagacattcccgagactgggtaatttataaaggacagaggtttaatggactcacagttccatatgactggggaagcctcacagtcatggtggaaggcaaaggaggagcaaaagcacatcccacatggtggcaggcaagagcgtgtgtgtgggggaactgccatttataaagccatcaaatctcatgagacttattcactatcatgagaccagcacaggaaacccgtcctcatgattcaattacctcccaccaggtaggacacgtagggattatgggagctacaattcaagatgagattagggtggggacacagccaacccatatcattactattttaatcattgtcttaatacatgcagatctatttcatatattttcgctgctgcatagaattccattgtgtgaataaatcacagctcatcctttctcctactgaaaggcagcataatctttttacattttttcttttctaaaaaaaactatattgagttataatcgacatacaataaactgtacatatttaaggtgtacaatttgatacatttcaaaatatttatacatcatgaaatcatcataattgaaataatgaacataaccgtcacctccaaacgtttcctcacgttcctttgtaatcccttcctcccaacgccccccacctgccctgtttcagacaacaactgatctgctttctatcactataaattagtttgcattttctagaaatttatgtaatggagtcacaaaatgtgcactctctttttgcctggcttctttcactcagcatgattttgagatttatccatgttgttgagtgaatcaacagttcattcttttcattcttgaatagtaagataaagtatgtaaaacactcaaaatgattcccagcatacaataagtgctttgtaaatggaagctgttattataatcatattaacaacatacttctcaaatttaagaatctacattgaacaataatttctaagccccaactgccaaaaacaaaaaaacaacaaaagcaaaccttttttgcttgaaaaataagtttaacacaagctatgctaaaacagaaataatgttttgggaaaaaatattccagctttcaaatagacagtaactccacccagtaggtcaatccctagaggtctccagggggactttttgcagctcattcatcctgccaatccatcagatgctatttttctcaaaatcagatgttctttttttttttttttttttttttttttgagacagagtcttgctctgtcccccaggctggagtgcagtggcgcgatctcggctcactgcaagctccgcctcctgggttcacgccattctcctgcctcagcctcccaagtagctgggactacaggcacccgccaccatgcccggctaattttttgtatttttagtagagacgggatttcaccgtggtctcaatctcctgacctcgtgatccgcccgcctcgggctcccaaagtgctgggattataggcgtgagccaccgcgccgggccaatcagatgttcttttatagaggaggcagctggctgataatacctgcatttctcctctctttcactacatccagttgtggagtctccattgtatttctctaaacatggattcagaactccttgataccagtgggggctgtgcttccgacttacagtatggatagcacacactttaatgtttacagttggtcaacccttgtacaaagggctttcctcaccttagttctttaatcctccccagcctatgaaactatttcagtatggcttttgaccgcaagtagtggaaaatctgacgttagtggcgtaaatattctgttttttataagacaggaattctgaaggtgggcagttgctaatatcaggttaatgacagtgatatcaatgttaagatatttgctgttctcttggctgctccttcaaggtggcagaatggctgctgtatcagccatcacatctgcattcaaaaaaaaaaaaaaaaagtggtagggggagatagagcccatgtcctgacatgataactctccaggaactttataaacttatgcctatgtcttcatgttcaaaactgtgcctcatgaccaccccagctgaagactgcctaaagagaaggaggttggaaatggtgtccagcacagatctgatgatagtccccattttaacaagttaattaaatgaagcttagaggtgttaaggacttatctcaaagtcatcctatgagttaacaccaaagctgtctaatttcatgaaactatgaagaccttctactttgataagactttaagtcatacatcttaattttcataatagaacgccaactctgcttccactcatctgatatctagagcatatggatatcttcttctgtgatagtcaatataataggcccttccatcagtcattgaaaaagtcagccttcaattgactactgggtagtcatgcacaaaccacaggttcataacactgacacctcaagctgagagagacagagatctgtgttcattctccattccagcagtttctctgaactccacaaacctagctgtactgctttcattcccttcattaaattacaacataatggtccgcccttgggttttgttgagggttactataataaaagataattttaagttattttttatgccttctgtaaaatctcagttgaagaccattctgtagcctgatatctgttttataaatatctgtgatatatgcctcctagaatttggtgcctgcaaaatttttagaggaaagaagagatggctctgtaccagtaacttgagtgagatgacatggttattgtaattaaacacagatttagttctgagctttcaggcaagcagttcataaaggaaaatttgagatcaatttttacgtgtttacagtaactatgtcatcctacattactagtgtaattaagtttcttctcattctgtattgtttagcaatccctatttagtctttattgtaattggtctgttttatgtctctttaaagactttaagtctcttcttgttctttttgaaaatataaataatttttaaaacaaaagaattcataaagacccacaagacagaatggtttagaagcaggatagtttagaaaagtaggaacaaagagcttggttaaggcatcaatgggcttatagttttagtgtacagagagaaggccaaagatcaagctcatcacagttctgaattctcttgccatttgcattattagctcaacaaatatttgagtgcttaattacactaattatataggaactcagatgtctgaaactttatgtaaaatgaatctctgtaacctgtttattataaaccgcaaggttggacagaaccttaaaagatctaatcaaatgtccaatctcaaagggcattgtgcttacaattattacagaaagacagctctctcccacctaatacctttcacttaatgacacaaatcatagtgaaatcatcaaagatttatcatctagtgaggaagacattctacttggaattgtggaaagttcaaatatagtataatgaaattgaaggggatggatggggtaatacacaagataataagtaaagatatattaggaggtaacaagtgatgtaaagagacatgaagctggggcagaggatagcaggtggggctttgaactttagggcgcgtaccagggaagaccttactggaaaaatagcacctgggtaaataaacacctgctggggtatgagggagcaaactgtgctggcatttggaagaagaggattcgaggcagagggtacagccagagcaaagccatgggtcagcgagtgactcatgatcagaaacaactactcgggaggctaaggcaggagaattgcttgaacccaggagacggaggttgcagtgagccagccaaaacagtgccactgcattccagcctgggcgacagagtgagactccatctcaaaaaaaaaaaaaaaaaaaaaaaaaaaaaaaaagaaaagggaagaaaaaaaagagaaacggggtgcctggagcagagcttgaggaggagaacaggagagaaaaacaaagatgcaagtttagtggaagtcaacaaactggcttttgctccaagtgagacaggatgccactggagggcataaaacaggggatgggcgtgatccaatttacattttacaagggtattcttgtctgccgttttgagaatatggtgtagggagtctagggcaaaagctacacatcttaccatttgggaagatgtgtagttaccaggtgagagcagatggacaaggaaggcagcagtggagacggcgaaaagagataacaaatgggaagccactttgaaaattaaattgcaggccgggcacagtggctcgtgcctgtaatcccagcactttgggaggctgaggtgggcagatcacctgaggtcaggaattcgagaccagcctaagcaacatggagaaaccccatctctactaaaaacacaaaattagccaggtgtggtggtgtatgcctgtaatcccagctacttgggaggctgaggcaggagaattgcttgaacccaggaggcagaggttgcagtaagccgaggttgcaccacggcactccagcctgggcaacaagagtgaaactccatctcaaaaaaaaagaagaaaattaaattgcccttcaagtataagatggcagtgcaatagtatccagagaatggccattcaccctggtgcagcagctgacacgggtctgtgtggccaaagactgaaccccaacctgttccatacgggtcttgaggagaaattcagccagaatgtacagacgaccttgggcctgggctccaggtgtgggcttgagtttccaggcttgttgagaacagtcagaacccagaagtgtggcgagagggtcacatttctttacatgtctcattcgttcagctccttcaacatcaacacttttcctgaaactcaaaccctcttcttctcctccaattctacttggaaacagagtagctcactgtaattccatcctaggtgtgacatggagcacagcatggccaagaagggatcaacaatgtgcctgtctttcctggtggaccctttctttctctggagaatttaggatcatctgcctgagataatcccgtgcgctccatggccacttcttgctaactgacatggttttctcctcaacgatccttttaaagcataaagagcttaatcaacccaaattacagggtctgcttaattccaggggttgatttgaatatcattgccttgggaggaggagaaacaagtctttctaaggagagaatttcctattagaagaactgttctcaaaagcatgtccttgtcaacccatgaattatatttcattttgacagatctcacatatagttgttatatctttaggggggaagaaggtgttgtgtgattaattggttgatagtgtatgttaattggatgctaattaaatttaaatttaattcatatttgaaacacttaatttaactcaggaccagaaaattagaatattcgagcttcttgaaggaacttgtctatctgtcaccttcatatgtctattgacactttctccttgtttacaaacttgtttttcaagagaagaaatcagatggttctcagagcttccagctgtaacaggaagtgttggttcttgcaattcataaatatttcattgctttactggaaaaagtacagatatctccaccctattacttaagtttgttctaaacaagtcctgtcatgctggaaaactgctgttagatccttcctttggcttgataattgaagaaaccactccagaaaagagtttctgcactctgtctccagaaaggcaccaaggtgctcagatagagagccaggaaacctgagagctggggagggcaccgttcatgacactggaagcatctgggaaattctctgaggctgttttttctacatcccaccaaggaaaatcccacgagatgaactctctgggaacactgttggcaaaacatccattgaggcctctcttacagcctcggagaggaaagggcatctacccagccctggaaggggagcggcagcctttatgcatttttgctgcctttggtagagagggcaactctacccaggattcaactattcataagcttccttggagtagagtacctggccttgggactgtaaagatattttccatttttagtatgtaaacaaagaaaactggggaccacaagtatgacagaagaagcatggtctttgagttttaaccactgtggtttgtatccagccagtaaagttgctgagttcttttgagccttggtttcctcatctgtaaaatgggataatactaatctcacagttatgttataaggattaaatgaggtaattaagatgtctaaaaacttagcacagtgcacgtggtgaggtgttcagtccccattactgcctagtaatttcagtttcactttctggtcctgtagaatgcctgttgggagcagcagtagctgttattattgttgtctttcgcgttgctgttttttgcacacatgaaggcagcaccattgcttctccttgaaatctttgctgtctcagtactggcatctgagatttgagccgccttccctcaccgactggctctctccccagctgtcctggagaagcctctggaaaagaaggctggcagaaactatggccctccagggaacaagaaactcatctatttcattgatgacatgaacatgcctgaggtggatgcctacgggacggtgcagccccacaccatcatccggcagcatctggactatggccactggtaagagcgcccatgtagagggactggcccaagggagcagagcctaaggcagggctgaaggccagtctctattctgcctgaacggcaaacctcagcatagctctggtgccagatgggaatctttgtggtaaaccacatttctcattcaattctctatttcccagagtggttccttcaaacaggagcactaatattcacatgaaacatttagccagagaagacactgagctctcatctaaggaaaaaaaacctactttttgcttcaagactcatctccgaagttgcctttttcacatgcccgaagcagaattaaccacttcccctgcaccatggccccacagcactgggcatgtgcttcaatgataacacctaacacacgccaggtgcagtggctcatgcctgtaatcccagcactttgggaggctaaggcgggtggatcacaaggtcaggagttcgagaccagcctggccaacatggtgaaaccccgtctgtactgaaaatacaaaaattagccaggcgtgatggcaggcgcctgtagtcccagctactcgggaggctgaggcaggagaatagcttgaacctggtaggcggagattgcagtgagctgagatcataccactgcactccagcctgggcaacagagcgagactccatcttaaaaaaaaaaaacaaacaaaaaaaaaactaccaaacacccggtaccatgcaccgtgtctgcagaccttccagcctcagtgccttcagagcagctcagagggctggatagtatctcttgcgacagcataatttttaatggcaaaagtctgaacttactaggaaaaaaaaaaaaagcaagtcactgatttgagacaactttgactcacctttctaccgcatactgaatctgctgctgagaaagagtgagaagagagaattcagagagaagaatgttagttaagatggcaacttgagttgccttctcttccttcccaaaatctttattggatgcttgaactatggaactgtttgcaatctccacactgacatctgagcagcttaatttcatggacaatcattagagtcaagctaactagttttactttagattcatggtcacaaaccttaaatgggaagtagaagcttcctggaaattctaccatatggccttagtatgtccactctcagaaatgtctatttcattccatcttccctctctttgatcttcccaccacacctcagctgatgaccttgccttctcagagaacacagatgccgcctccatttcttgcttccacatctatacaactcacccgtgtccccatgcatctctcctccaccctcctgttacatcttacctaaggccaaaccttccaccagcctcttcattctaccgtctcccactcatcgatcggtccccatctcctcattagctgcttcacatcatttaaacttgcataaacaggctgggtgcagtggcttatgcctgtaatcccagcactttgggaggccaaggtgggcgaatcacttgagcccaggagtttgagatcagcctggccaacatggtgaaaccctgtctctactaaaaatataaaaattagctggatgtgggggcccatgcctgtagtcccagctacttaggaggctgaggcaggagaatggcttgaacccagaaggtagaggttgcagtgagccgagatctgccattgcactccagcctgggtgaccgagcaagactccgtctcaaaaaaagaataaattaaaaataaacttgcataaatttattctattgggttaaaaaattactttataattactgttctgtccccactctcttatctcccactcactcctcaatccactattatttgatttctgttccctccactgttcttactaaactactatctgcatcattattacaaaatccaagaaatcctttgcaagcttgtccagctgccttattttgttgttgttgttgttctggtttgttttgttttaggcttttagcagcctgaaaccatggtttttagtttctgtctctagtgataagtggaaaagagggatgaggaaggggcattactggcccaaccagagatggaagctaagaacccatgactgcattctctcccttagacacccctgctgaagtcactacctttgttattctctctgcagcccttgatgtggttgaccactctcttcttttgagaacactggcttcctttgccttttggtatggcacgaacccctgatttttctcctatctttttgtccatcctgctggctcgtcttcctatgctatttccttagatatggaggtaccttgggaatctgtcttatgctcttatctcttctcaatccctgccggtggatctagacttttttatcacccaaacacatgaacagtagggcacatcctaccgcaccttgacaaagcactcacctgcctcagtcctcagacacctttcacctagagcttctgactgttccaggtatgatcggagcaagctgtccctaaaggagatcacaaatgtacagtatgtttcctgtatgaaccccacggcaggcagcttcaccatcaacccccggcttcaggtacaggaggagccatgggacctgggtcctaatcctatcttactagagctgatgccccttgattataagtataataattggcctttttccccatgcagcctctcagaatggtaaatcagatagaatgccaaattgcatctctaggggaaaagagaaactcctagacttagagtctcaagattggaaggggtcatagatttcatctgatttgatccctctttcttcagatgagggcgcttcagagagatgaatgactttcccagggccatatggattctcagtatcaaattcagatttggactcagattctctgagtccaagtttagttctcttcctactgccccaggctgccatctttaactgaaggtgctttgcctgttattcccctagtcattttaggttcaacctaaatttgggcatagtgtgagagatgggaccaaaatatagattcgaaggctgtataagaattttctgttatctccaaattcagaagcggtgatttctactccgtggtaacggatgttgagctcatgcctttgtttcctgtacagcgtcacttcagcgtgtttgtcctctccttcccgggggcagatgccctgtcctctatctacagcatcatcctcactcagcatctgaagctcggaaacttcccggcgtccctgcagaaatccatccccccactgatcgatctggccctcgccttccaccagaaaattgctaccaccttcctacccacaggaatcaaattccactacatcttcaacctcagagattttgccaacattttccaggtgagttcatcggctccgagacaccctaggggcttagtgattatccagatgctccgattcttcataaaaataagtagctaatgcccagctcataggcacaggcaaagccactgttcatatgtaatcatgaacataagcaggtacacacagtgccatgggctccatgaggaaggccctcaataaaatagagtttcctttgccaattaaattatttctcggtaagcagcatgcatctctgagttggttccctgggggctgcagaaggctcaacaccttggagatagtcttatataatgagtccagtatgcctgggaagaaaaatggcccaaaagaaagaaagaaaactattttggatctcccattggtacacctattgatctcgggatgaaaaagagtgttccccaaactgtgcaagatagctctgcttcctcaaaaaaccacattgtcatactcctaagatgccatctgccagcctctaagagggtctcagtcctaaaattcccaggttcatttctagactaaagctgtttcagatctttccaactgcttatctgaatagtgatggcgtatctctgcctattgcttccaattgcttggctcatcaccatcaaagtctccagagggccatctagcaaacccagaccctttcttccgtctggtcagatgtagtatcctcatgtagccaagtctacaactctcccattctggacaagaatctgcagaaactcatttgtagagagaccttcccccaagataatactgggttattattgagggaatgatgcctttcacaccaagcagaggccacacccataaaaaagtgtcgaagtgatcaggcagtgacaccaccttccaatgacagcacatgtaattgtaattaatttctcagagcaattatgcaggcaggactttgagccaaaccatcaaagctccagaccctgacgacataaggccaggttgttccagcctgaactcctgattgtaagaagcagaaacctactaaaccctggttcagagactcaagagctatggaccaggaaagctccacctgaaggtggaatcaatgagcccctcagaatgataagtctctgagaacacatccaggctagttcaggataccactcctgaatcagatgtagctcccaaacattagctcattttaaaaattaaaaacaaacagagacccacatagatcatatatatttgcccaggagcacaaggaagccagtaaaggaactggaatctaggtctttgggttcctggcctggacgactttccaccacacctttctgtcctcatctgaatttccaatgaggaaaataagcatgtgatggttaaggcagcaagagagactcagctctgagcctataaagcctgcatctctgcaggcctcaggactggacagcagcaaagtttgtgcttactcacaactagctcccattttatgagcattcattgagaaagactttttcaccacacaatctttctcttaaatattactgcagctctatgaagtgggggtgttactaggtggatttttcaaatgaaaaaaaaaagaagttaacattgtttgatcaaatctacactgctcctaagtgacagaactgaagggagaagcatcaattatgctccatttatcagaagcaacccaaccttagcttctgcctggaacagtggtcttgtcccctgtacaacctgaaatgtaatactcacgacaaccctttgggatagacattgttatcccaatttaacagaggctcagagaagttactagctagtcaatgacagcgccaatggtcagggaggttaaaaaaaaaattctcgtggaatagcaaggagtttagcccagtgggaacgacgagtgatatggaaaggagagatgaggttggaaaggtaacttgagaccagagtgggccctacttaacagttagactttagtctgtaataatagccaacattgactgagcacagtgctaagccctttacatctatgaatgcacttaatcctcacaacaaccctagaaggtaaaatactgattattttcaatttagagatgacaaaaccgagccacagacaaatcagtctcttgagcgtgactgcatgatcgcataatggtaagcagcagcattgatagaacagctagaatgttcagcactgctgtggaggtaattcacggtgacaaaaggcttccggaggaaagagtacaccttgtggtagtggtcactgatgcaatatcaaggaggaaccagacagcagagacatgggagtggagattgttcccctggcctgtttctctgcctgattcagttagcctgagtggaaaccccctgaggtctgcatcccagccaggcgtctttgcagcctgccagctgtcagctgctccaagtgtggagaacgcaacatccctggagtgctgcctcccttctgctacgtggtcccctcactctcctactctaaggagagtttcaggctcatagcttgaccacagtctcctcctacctgctgtgaaaagaaaaaccttagctaaattaagtttaacagtgtttaactgatcaaagaacaattcacgaatccgaattgggtagcccaccgggccagagtaggctcagacagactccagcaaagccacgtggtggaagaagatttctggacagaaaagtgaaagtgatgtacagaaaacagaagtgagacacagaaacagctggattggttacagcttggtgtttgccttatttaaacacagttttaacagctggccacctgcaattgggcaaaactcagtgattggcacaagagtagttacagtcaatttacacctccttttaagtcatagttcacaatgtacagagcaacttttaggccatacttaaagcacatcaggaggcagctttaggctaaacttgatttaacactcccttcctccttgagtctgaccaaaggcctgattgaagggtatagagggtggtttaatgtctactaggagacaggcactgcccagagaacactgttgttttcctttatctggcttgatcccaggctcagtaattcagaacttctctgtactcccctcgctctgttcagatcagaacagaatttgatagtgctctcatatggtttggctctgggtccccacccaaatctcatcttgaattgtactcccataattcccacatgttgtgggagggaccagtgagagataattggaaccatgggggcagtttttcccatactgttcttgtggtagtgagtaagtctcacgagatctgatgattttatcaggggtttccgcttttgcatctttctcattttctcttgccaccaccatgtaagaagtgccttttgcctcccaccgtggttctgaggcctccccagtcatgtggaactgtaagtccaatgaaaccccttttcctcccagtctcaggtatgtctttatcagcagcatgaaaacggaccagtacatgctctgagtagcagaaatcactaaccattcccatctcagtgcaacacataactatctaagatggtgcagagttggcatatgacatgctcacatttactcagccttaattgtcaaccaccctgactatttggctataacaagatttataaacttcaactgatagcttgcctcactgtaaaacacaaaattctaaaggtctggactcctggttgttgctttttcttgtcctctgaatttcatatatggcaggtacctaggagagctaagaaggagacagaggctgcaataaacatctgggtagagccaaggagacctaagggaatttctttttgcttttaataaacttttatcaaagtgtaacatacaagtagaaatacacaaaagccacaagcatacaacttggttaattatcacaaagggatctcacctatgtaatcaccactcagatcaagaaagaaaacattctcaatatatccctgatgttctcctttgcaccttccattcatgctttcctgctttcctcctcttgtcagccctacatattgtctaaacttctaacatcataaattattttgacctatttttgaactttatataaatagtatagccaatatcactttgtatctttgttcagtattatatgtgtatctctatttttaataattgttactttttgacttaaagagtaacagttatgtttctttcttttcaatccttaaatttttttagttctttttcttgtcttattgtgctggctacaactcaagtacaatgttggagagaagcaatgagagtagcattttgacacagtcgtgattttacagggaaacacttttaatagtttgccattaaatatgatattctctactggtttttctgggtaccttttacctgattaaggaaatatttttctgtgtatagtttgctaagagttttaattatgaatatgtgttgaaacttaacaaatgatttttctgccatctgtttaattatataaagtttttctcttctattctggtaatatgataaattaattgattattttcaaacattaaatcaaccattcctggaatcaactcattttggttgttacatgctcttttttaaatattttcctaggtttcatttgataatttttaatataatttttgaatctgtattcataagattgtcttgtaatctttctctaatattctaaggttataaagtcctcataaaatactttgagaagtgtttcctctttttctgttctctaaaagatttagtaaaacattgtattgtgctttccttaaatgttggaagaatttactggtgaaaccacctggaggtttgtttggtagaggttttaaattataaattcaaattctttaatatgtataagactattcagattgtctatttcttcatgtgtcagtcatgttaagacatccttgttatcaatagttgctaatttattggcataaaattgtaatattctcagattatcttttaaatatctgctgtatctgacattatgtcctcttccttatgttgggtattaagtgtgtcttttctctttttttctcttctatcatccttgctagggagttagcaattgtgctagtcaaaaaacctgaagggtatacctgcattatgcatttgactttcttactgtcttaatttgatatctgttttatatattattaatattttctctttgctttataatttttattcctacttaccttgggtttggggttagtttgttctatttctaacttcttggcatggctacttatatcattaattgtcatcctttgtctcatctaaaacattcattataagactatataaatttatctctaatcacaccattagctacatcatgcaagcttttatatgctgtatttttattatcattcagttgataatatttaatttccactatgatttcttctttgactcacggaatatttagaagtgtattgctttattttcaaacatttagagattatctagttatctttctcttattgatgcctactttaattccactgttgtcagaagacactctatatggatttattcctttgaaatttgttgagactgctctatgtcccaagatataatcgatgtgcagggtttttttttaatgcattctgcagatattgggtatagttttatcaacattccagttaaagcaaccttgtaaatcatgttgtttaaaaaattcctaaaatttctagatttatttgtctgcttgttccttcagtccctgagagagatgttacgatatttcactgtgatggtgggtacgtttatttttgcttttatttgtcatattcactttatatattttgaaactgtgttatttattaggtacatacagatttagaattagtatatcttcctagcagactgatctttttcttattaagtgcccttctttatctctaaaaacgatgtttgctttaaagtcaattttgtatgacattagtatgtatgactattccatatctttagtcaatatttttatgacatgttttcattttcttgcactcagcttttccatattcttatatttaaggtatatctcccataagcagcatacggttgggttctttaaagtcccacctgacaacattgccttttaattacaatgtttagctcatctatgttattttatataataatatatttatgattaaatctacttatgctctttttaatatattctatctattctacctcctttcttctcacttcttgtattctatcaaactaatcgtatgtttttataattgttctccctcttttagcatagtatacatccttttgctattcatctaatggttaccaaaagcatcattttatctttttgtcttttataaattagcatatttattaattgccatacaatgcaaggatcttgggacaatttacctctcactgatttttgtgctatcatttattttaattctctgtattttgaaaactcactgatatctgtgttttagtaagtcagcattcctttagagttacccatatgttaccttttccattgctctttattcctgtacattcctgttctttcacctgggatcatttttattctgcttgaagaactccttttagtatttactttagttcatatctgttggagaagtatctcacaattttaacttgaccaaaaatatatttcttatttttaaaaaattttaggagtgtcttggatttctaggttggttgctattttctttcagcactttgaaggcttcttttattgtttctgttgagaaattacctttagacttatcacttactaagtactaataatacaattataaaaataaaccacaacctaaataaagtctgtcaacttcctacctttgagacacttgccatcacccggaagaagcaaacctgtataaagaaaaaataataatttgacaacgggtgaggtggctcttgcctgtaatccagcactttaggagaccaaggtgggcagatcacttgaagccaggagttcaagaccagcctggccaatatggcgaaacctggtctctactgaaaatacaaaaattagttgggtgtggtggtgcgtgcctataattccaactgttcaggaggctgaggcacgagaattgcttgaacccgggaggtggaggctgccgcgagccgagattgcaccactgcactccagtctgggtgacaaaaagtgagactctgtcacaaaaataatattaaaaataatttgggaaactaataattcttctataatcgagacgtatacataaaggctctgtgaggcacatgggagggaatgccgctggacaggagaggtgtcttgggcgacttcaacaagaggtttcaattgagctagatcttgaaatatgagtatggcaagcaaagcaaaaggcatgaagacacagaaaagtttgcaggatcagaacataataggaattttgtgaaactggaatctaggttttatgggaagtagtggtaaaagtgatcatgaggggctgggcacagtggctcatgcctgtaatcccagcactctggggggccgaggtgggtggatcacctgaggttgggagttcaagaccagcctgaccaacaatgagaaaccccatctctactaaaaattagccaggcatggtggcgcatgcctgcaatcccagctactcaggaggctgaggcaggagaattgcttgaacctgggaggcggaggttgcagtgagccaagatcacaccgttgcactccagcctgggcaacaagagcgaaactccgtctcaaaaagaaaagagtgatcatgaggaagcagattgtagtaatgttgtcaccagacttgtattctatgttaatggatctgcacattattctatgaatttaagtaaagacccattaaatgatccctttccctctaagacaagaaagcaagcaatgagaacaagcacagacatagatgagcttgaacttagagaatttgttgaggttattgaggggctctaacattggtggtctccacctttcagtaaaataaaagaaggttaggactttggctaatagtaacagaaaaagatgacagagaaatttgaaaagaatgataaatatttgaaaccaaccctgtggcacataggaaggggaactgactagagataaataaatagattgctgacctgccaaggttagctatatcccttctagccctttgttatagttctgattttacatagtcaattgttatctgaatcagttttcaaaatggcactgtggaattgaaatatagcagagaaaccactttttccctcattgtgggtgattcaaaatggagtggttacaattccaggcattatagttaggaaggcaacttactctatgaaatggggcgtgttttctctctgaattccaatcttcacattatacaaaatggatttagtaataattatttcatgggatcatcatgagtattaaatgagcttcatctggcgaagcatctagtccaatgctggcttcaatagcatctagtccacataactggcttcaataaattatagctgttgcagttgttatttttatgatgagcacaaaagaataattccaatgtattgagtatgtaaaatgaacaatgcttgtttccttaggcatattaatttgaattatttagacaactttagaaagtcagtatttttattccactttgaaaagtgagcaaactaaggctcagagatgtcacatgcctcgcccaaagtcacacagttgcttagtggttgcccaaagtcacaagtcacatagtggttgtgcaagtatttgaggtcaggtctgtctaactgcaacccttgggtctttctttacaagctccctttcagcttctcagtgttccctccactagaatgatctgtttagcaagacaagccctagacatcatcccaggttagataaaatgctccaggaagttttcctagctattgtacctctggatggttattaacgttatttttttgtgtctgttccccttgaagggcattctcttctcctcagtggaatgtgtgaaatccacatgggatcttataaggctctatctgcatgaatcaaatcgagtttatcgggataagatggtagaagaaaaggactttgatctttttgataaaatccagacagaagtgctcaagaaaacttttgatgtgagtattgccctatggattttctttgtatttgaaaaaaaaaaagataattatacagatgatcacccaatgataaaatctagctgtttaatggagaaaggccagagtttaggtgaggaaggaaattctgtcataattttgcccaggtaaaaaaatgctggggcaagaatagatgcaaattaatcccagaatcccagtgttgaagaagtccatagagatcatctgatccaagtccccacatggtacttagtcccctagcagcatttctcagattggttaccccagtgatgctctagcatccttgaaatgcatcatcccattgtttccaaggccgccattttggggctgctaataactggaaattttgagcaattttttttttttttttttttttttttgagacagagtcttgctctttcgcccaggctggagtgcagtggcgcgatctcggctcactgcaagctccgcctcccaggttcatgccattctcctgcctcagcctcccgagtagctgggactacaggcacccgccaccacacctggctaattttttgtatttttagtagagacggagtttcactgtttcaccgagggtttcaccaagggtttcaccgaggtcgatctcctgacttcgtgatccacccgcctcggcctcccaaagtgctgggattacaggcgtgagccactgagcccggcctgagcaattttgaaacttggaacatttgaaataattttaaagactgaaaatttggtctaataataatctagaagttatttctctgtccactacccaggtctacatgacaaactctcaaatattttaatgccacttatctcactcttcctgagtcttctcttctccaggcgaaatagcctgaatccttttaaccatttctgacatggattggtttcaaacttaaagaactctgacatcctcctgattgctctctcaccagttctcccctctgaaattgtgatgcctgacttttcgttgcacaacccagctggggtctgaccaaaaccaagatcatcattcccccttttcttaaagactatagttttgtttctgtgtttcccaaaatgtgtcctgctaagtagttttgctacaagatacttcttgaaaaagagtctctgtcatgaaatgagttgagaaaatgtttcactgtatatgactctcttggaaattcacagtggatttaaggcattaacgttctgcacttggacacaggaaggggaacatcacacacaggggcctgttgtggggtggggggagggagaagggatagcattaggagatataactaatgtaaatgatgagttaataggtgcagcacaccaacatggcacatgtatacatatgtaacaaacctgcatgttgtgcacatgtaccctagaacttaaagtataataaaaaaatacatatatatatataagacattaaagttctgaaatcttgaataactctaattcacatatcattccccaaatgtattggaccctaaaattctttcctctcattaaacctattaataatttacataatgaatggcccatggattatgccttgggaggcattgatatagtagcacaacctgagatcgtattctatttcttagcgtcgaaattaccccacagttaacaatgagccttctattaaccaaagccccatcttttccacacatactgcttgtctgttccctctggaaattagaaatattcaaattttgtatttaggtatgctatgttgtcctcatactcaccttgtttggtttagctccgtatttttttcctggtaagatcttgactctacctctgaagatatctgcagtccatcccaacctatgtgacagccttttgaatgtttagacagcattttaagtcacttattttattctgctttttactaagccagctgtcctaaattctcccacttctctcagcattgttattggggcctgatgtttgagaccctcatgttagatgcccttctctgagcatcatagagttacccaattcaggtattcattgttggcctggcaaattagtcttcatggtctttacaagtcggtctgagctagcacttcagagtaataacacttgaactttcaaatagagttccatgtgtgggtctgtgtatgaagagcactgccttttgatcacagacccagatatatgaatattgccattatccttccccaacaacatttgaaatgccagcctgaagcacccttggtcacaccacatcttggtattggtatcaaggaaaagttgccagattttcaccaacaaagcaataaaatcctgtttccactattcaaagcttaagcttctctgattcatggccctgtgtgatttggcatcactattaaggaatctttgattcactgagttggttgattttctctctgccttctacacagcatggctctgatcataaaatcacagacttgttttgttcctcaaagagtctttgtaaaccagccttttcaaaactgcactttagttcctcctccgctagatggtttttgtcaattgactaatatgagaactgattcccaggacattagcccattctcaaacagggtaaatgtcttcccacattacatcctccatcctcatgtgttttcctaatagcaagaatagtcctcctgcactgcgcttacatcttatccaaatgtctgagcatttttgttattgtctggcaaagccagaatagtttaaaagttttctatagtttttgaaatcaccttcaaaatctaataacttttttatttttaactctttccagtcctttcttcttacacccaggcagcagccctggtttctctatagatgttactgtcttcctcactttccctatattaggtttggtgaatctcatcccataggttacaaggcttaccctgcagtgacttatgccctgggacgtgtccctgctgataaataacacactggttacctctttcccaggtaggtcttccagtctgaactttaggaggaaaaaacgacaggtgcggacaactgctcatgctggcataacttcctatttgtgtcttagaaagcctattctttctcggacttttctcctcgacaacctttcctctatctcaagtctcaggtatttgggttttgacaggcaagtagttcctttttgtctccactaacatgaaagttaaaaaattggtcttctcttcagtacttagagatatattggtgaagagacgcagactccttatccttcaaatgaattgagttatactatactataaccagcccgtatttattcaacatggtaacatttctcctatgggtgagatttgacacacagcccgaaagtgttgtaagtagggagttctaccataaatgcgttaagattaccataaataaaccagtcacctgagggtggctagtagcgcattcttcagaaaccaagccctctggactgaacctatgaattcagggctggcaacatacttgtgtaatctcacaggaaaagatgttggatggctttgctgcagattgaggacctagatctgttggaatgtacatgcagaaagtgaggcgattgggccacgatccccttcattcaatactggtgaaagagcccccacttagagaaatccacccatccatccccatccattcttctcacagaagcactctcttaccgtgcttgtgaggaggccccatcccacctcccacttcccatcctcagtccttaaggaataacaaacatcacctgagacttcatggagctggtagatggatgttaagcatccacttaaaagggcttctcaagagaagggcatgttggaagtagcactgatgcctaatttccagggaatgtgcagagcaaatcaggtgtctctgctctgtggaaccagccccagaagtcaataatgagggcccttattcctgtgtctcatcaccaggatattgaagaccctgtggagcagacccaaagcccgaacctgtattgtcactttgcaaatggtattggggagcccaaatacatgcctgtacagtcttgggaacttttgacccagactctggtggaggccttggagaaccacaatgaagtcaacacagtgatggacctagttctctttgaggatgccatgcgccatgtgtaagtgtgcttctcctcttccttttcctcagttgcttcctcttcccaatgacaggggtctcattcggctatttgaggtcacttccgtaaagccaggtaaggagctccggcttctgccttaaaagtcaagatggctgctggcagagcagctgcagctcctgccgcagaccctagggggcagcacagtgcggagctcaggcaggaatgggttcatttccaggtccgccatttgctatcccgggcataatcacagtgacagcaagaacagacttgagatcataaaatgggacccagaacagctcaggacctccatcaccaccttgttattagtccaagggccatttaaaaaaatgagataggctggacaggatgactcatgcctgtaatcccagcactttggaggccgaggcgggcagatcacgaggtcaggagatcaagaccatcctggctaacacggtgaaaccccatctctactaaaaatataaaaaaattagccaggcgtggtggcacgtgcctatcatcccagctactccagaggctgaggcaagagaatcgcttgaacctgggaggcccaggttgcagtgggccaagatggcgccactgcactccagcctgggcgacagagcaagactctgcctcaaaaaaaaaaaaaaaaaaaaaaaaaagagagagagagagagagagatagagggtttgtattcaagtgcatacatatttcaaaaattaaatatccttttagtgtttttgctatctagtgaatcactgaaagtaataaccaagcctccaagacagtctagcctcacaccaacaccatccctaccctgcttcttacatttcccaatctgagacccattgccagcgctcactgccctccaaaatccttccgccttcccccagggtactcacggtcttagcaacaatatctgcttcatttcaacttctttgaactttccctttactgccaaattctaactgatacctgactgacccctgagtggaggaaagctgttttttcttccccattctatgtgccccagggcctagagaggagtaagtaacctccttacccccagtcccccaccccaatggcacatttaagtcctttcttctcttacccttcaaaaccccagttcttttgaacacaagtcacctgcctttcctactcattcttcctccttgtcactgttatctgctgacagtcaatcactccccatcatccgctaatggccttagtccctgggcacccttcctcctcacccatgtctcgactcactcttggcatctagctaataatcctttctgttccttggcttgcttggctcccatggtcttttcttctagcccacctcagttctcactttcatgttcctataataggaacccaccttcaaaatcccaacttcaaacatcccactttctgacctgtacctgccaccctcccacttatctgctctggtctttcattcaacttcaagacttcattcattggaccaactacttccccagaagtagttatccgttatctctccccctaccatgtctttactttccctttttaaaaattttattttattttattttattgctttttgagacggagtctcactctgtcgcccaagctggagtgcagtggcgtgatctcagctccttgcaaactctgcctcctgggttcaagcgattctccttactttcctttttaaccaccatagaccccatcaccccagtgccagctcccctaactttcttgtcattgtatccacaaaatctcactcgggctagaccgcactgtctttttttgttgttgttgttttgagagggagtctcactctgtcacccaggctgaagtgcagtggtgcgatctcagctcactgcagcctccacctcccaggttcaagccattctgcctcagcctctgaagtagctgggattacaggtgcccaccaccaggcctggctaattttttgtgtttttaatagagacagggttaaacgatgttggccaggctggtctcaaactcctgacctaaggtgatccacccgccttggactcccaaagtgctgggattacaggcctgagccactgcgcccagcccccactatcttcttactctacccgtgcccctaagcagctagatactgttgaggaaaaatatcccaccatgttgattgtttttgctccagatctgcatccataaatatcaaacaggtctcaacattgctagaaattgtcctcctctaccctaagcatgttgcttctttcaccatcccgtgataactgcattacacattttccttctcttttcaaactcccagcgccttattcccagttaataagaacatctcttatttcactgggataatgaaagtgacaagaagagaatctcgcgtcttcccgtcatcaaatctaacagcctatgtgtatccctgcatccctcccacaagtcctgccttccctacaacttcagttcatgaacacccctatccctatctaagtctagtccctacacctgcgccctggatcccacctcctctcaccttctcggtgacttcacctctcgctgtaattatctcctctctctctctctccttctccctctcctattttctctctcccctcttttatcttaccccatcattaatttctggattatatgcatcagcatacaaacatgctatgttatcatttatcaaaaaataataaactattccttgcctcttacattcctttccatctactacccccatttctccgctcctatccgcaacgacactcatccaaaacgttgcccatctttgtcttactttctcacttctgatttccttctctgcccacttcttagcccttgaacaaagcagtgcttatcattgtcacctctgtagtgaggtgaccacacgtcttgctgaagtcagttttcactgctaagtcctcgcctatattacatgacgcccctgtggtcaatgattaacctctgtctgtttgcatcatccactcatccaacatatatttattgattagataatcttaggataagtgccgggatcctaacctctaggacactgtgtggaacctagcaggtgctcagtaaaactgcttagcatgttatatgagactaaatcatgcagaggaaaacagagagggaaggggagtagagaggactgagggtgatcctaattataactagggtcatcaggaaggcctccctgagagggtagcatttaaaacgacatgtagctcaacatagaactctctgtgtgccttgtgcatagtgctttgcatatatcattgcatttagttttcacaaaaaccctgaagaagtaaagttttgttattgtctctatattataaatgaggaaactgagactgagaggagagaagttgcctaaggtcacactcctcataaataggtagaacttgcaatagtgcaatctggctccagagtctgtgctctataccatcatcctatgaagcttcttcaaatatttttttgtatccccctaatctgatgtgagctccttgagcacacagactgtcttgctcactgctgaaaccttagtatcttagacaatgcctagtgcatagtagggttcaggaaatgaggcattaaaagttcaacctgccgggcaccgtggctcatgcctgtaatcccagcactttgggaggccgatgcgggtggatcacctgaggtcaggagtttgaggccagcctgaccaacatggtgaaaccccgtctctactaaaaatacaaattagctgggcatggtggcagcgtgcacctgaaatcccagatactcgggaggctgaggcaggagaatcgcttgaacccgggaggcagcggttgcagtgagccaaggttgtgccattgcactccagcctgggcaacaagagtgaaactccatctcaaaaaagaaaaaaaaaattcaaccttatgaagctccagtgagtattctctcttctcctgaagagccaccagtatgtctgtcatagtcttggaattgaggcaagtctttgtcctttaagggcgaatttaatttgaaaaaattgtaagtgattccatcaatgtggcttccaacatgggtgatcaaactaatattgtttttagaaaaaaaaaataataagtactggctacaaacactggctttcttccataggcttataaacaaactctgaagttagtatccaaagagaagcctgagcctcatttagcaatggcaaaataactgggaaaatgaactgcctggaaggggacaattctgaagaataaaatgtatttagttgtataatttcccatacatttgtttaaagacatcaaccacccgttactttatcctcgctctgccattccctcccttccctggggctcatggacctctcgttgctgcctctaccaaccaataaagcagaaggattccccttcttagatcagaaaaaggataccaggcagtaaagggagaaacacagataacctaagagtgtgggaagactctatggcctcacatcgctacacacacagcactccagaaaggtaccaccttctgagacgcaaagtgggagtagggtgggcatggtggctcacacctgtaatcccagcactttgggagaccaaggcgggatggatcacctgagttcaggagttcgagactagcctggccaacacggtgaaaccccatctctactaaaaataccaaaaaacttagccaggcatggtggcagacacctgtaatcccagctactcaggaggctgaagcaggagaatcacttgaacccaggaggtggaagttgcagggagccaagatcgtgccgctgcattccagcctgagcaacaagagtgaaactccatctcaagaaaacacacagacaaaaaaaaaaaaaaagtgggagtaggacagagcagacgaggaaggagactgtgtgtgtgccctcccaggaactcacaggtccagggatccaaggcgagaacctatttttataataactccatccagctgtttgttctcaccactcgagctcgcatcatctttctttttagttagagtcccctacacccttccccagctttgctgctctccctttctgcagttttgatgctgaactcagtaacagagcactgtgtagtggttatggacaaaaaccaaaccaaagttcaaatccttgttctgccacaaattggttgggatgctttgggaaggatgcttaacccccaagcctaaatatcctcacctgggaaattaggatattaagaatgcctgcatcgtagggttgttgctatctatgcaaagtgctttgcagtcagtaaatatgaaagtcttttttctttgtgctattgccttatttccttagtagtaccacttttctactgactttcgtcaccacttcagcagattcttgttctgctttttcttcaagctttaaaccagatcttttcccccgcttttggcatcatctccattcatctttttctgtctctttgtttttcactcccacatatattttcttctcttagaatcacttagcaatcattaacaacaacaacgacaaaccctcagatgtacttcttttgtgccctgagaatcttacccattctctaggggtgtgtgtgtgtgtgtgtgtgcgctcgcacacacgcacatgcgtgtctagtccaataaatcaacttcctccagctgtgcgatggtgcatcttcagcttttgtttttaatctctcagaaattcagtaatggacttaacttagactgccttggttttctggcccaggagcactttagaatattgatcttctttttaaattttgtaatttaaatgcagagttctttgccctcatcagaggttggtaatgaatccccagctggagtccggtgctgacggttgcagacttaaccacacttctctggaaacttcatcacaaacgatgcatttcccattgagatattgaatggcatgggccatgctaagctgagttcaggccttcagaatagggctggggggttgggtgacccagagaacccagctggactccaactcctctgactcctcctccatgcctgcctctctctttcctccactaatcctttcctgccccaacttttctgaatcaggagagagaggctgggtatcttagcaccatggcttctcccttcatcaggcaccatctcatgcagacacaaagcagataaccccttgcacccagcgtaatgaatcattgcgtacatcaccccaaatgtggagctcatataaggcatgggttgttctgtttaaatttaacaaaaatgtattagataccttcaatgtgctgtcactgcagagaatacaaaatgagtatatgtactcttcagacatctagaaattacagtttcataggaaagcaagagaagtgtaaatctatctgatataagacagtataagtttcacaattaaataattaaagtggaaaagtaaaatcataaaattactgaatgtaggtcaataaataactcctgaatatttaagtcaaaacattttaactacataaaatttagtagttaaccacatccaactttaagacctaaaaatatttgtatatctgaaacatctttaaaaaactggaagataaaggtgagaaattggaggataattgaaaacatacataaaagggtttcacaaattgagagaaacacttcagttgaaaagcaggcaatgggcatgaacagaaagtttacaaaacaaaaataataaaatgcttcataaacatttaaaaatgttcaattccctagaaaccaaataaataaaaataaaaacagtaatttttccaccattaaattggcaaagattggccaggtgcggtggctcacgcctgtaatcccagggagggaggcctggcgggtggatcacaaggtcaggagatcgagtccatcctggctaacctggtgaaaccccatctctactaaaaaaacaaaaaattagccgagcgtggtggcaggcacctgtagtcccagctactcgggaggctgaggaaggggaatggcgtgaacccagaaggcggagcttgcagtgagccgagatcgcgccactgtactccagcctggacgacagagcgagactctgtctcaaaaaaaaaaaaaaaagttctttgggggccaggagtggtggcatgcaaatgtaatctccgctactcgctactcgggaggctgaagcaggagaattccttgaacctgggaggcagaggttacagtgagctgagatcccaccattacactccagcctgggcgagaaagcaaggctctgtctcaaaaaaaaaaaaattagatgtaagattcagtgtcaacaagggttgggggccagactcctacacactgctagcaagatttcagagcagcaagcgcaccccacaggagacatggggcaatgaggaacaacaaacgtttagtttatttatgttaattgtgaacaggtcatcagtacatgcaagaaatttgcagaaataagaaacttcaaaccacagaggctcaacacaagctctgtaactttatatacactcacatgttgttcatgcgttgaaccccacccaccaaaacccgtgtccagagtttcttccaaactggagctagctagaccttatgttgctccaccctacttaatttgaatatggcatttctaattataacatcattaacacagacaggagcacaggattgtagcccatgcaattcaatctcaaacgtatcctctactctatttggccaaactttacccgagttcttttttttttttttttttttttttttttttttttttttttttgagatggagtctctctctatcatccagactggagtgcagtggagcgatcttggctcactgtaacctgtaacctccgcctcctatgatcaagagatactcctgcctcagctgccctagcaggtgggattacaagcactcaccaccatgcctgctaatttttgtgtttttgtggacacagggtttcaccatgttggccaggctggtctcgaactcctaacctcaggtgatccccccaccttggcttcccaaagtgctgggattacaggcatgagccaccacacctgggctccaaagaactttttattgctacaaatgtttcacgcatccagactgaaatcttgaaccctctccagatggggtttcaccatgtttcccaggctcgtctcaaactcctgccctcaggtgatcctcctgcctcagcctcccaaagtgctgggattacagatgtgagccaccgctcccagcccgagttcctattctcacactcttttggtccccaaatcaccaatacctgttgtctcttcttccaaaaacatttctctaaagcagcttgatcactgtgttacgtagccctgaatttgctgacttaacacatcctaattcaactaacacatccagtatattcaaatcctccaatatagcagatccaccttttgatcaattctacccaggaaaagtacatgtcggtgccgtcattctgcgcggcagtctctaaagactgtcttactgtttggctcaacagttttacttctagaacttatcctgaggatataatcagagatataaacttaaaaaatatatacagtgttatttataaatggaaaatgttggaagcaacatacatatccaagagcaggctattacagacaggcaatttattctatccttattaccaacacaatgttggtattctacacaataccattctaccatcaaaagtctggtttagctgaatttttaatggcttagggaaacaatcacagtatattgctaaatgaaaaaaaaaagttttcaaaagactgtgttcagtatacaacatgaactcaatttttaaaatacacataacagaaatatattgacttttcaggtacaaacaatgtatgtacatatatatttataaaaatgcagacaaacactagaaaaaagtctagaagggcctataattcacatcagtagtgtttattgctaaatagtagaactgtggatttttttctgtattgtacgcattttgtacaatgcagagccattgttttaaagatgagaaaaggagaaaatcagggttctttttataaagggtgtagcaccttgcataaggtatatgcatactgctgagaggggttagacatacgattggaagcggatcctggaggagaggctgatggagggtggcctttgaggaagggctggagggcaggaagagtggtttcctctgaagaagatgaggtctggaatagtcttccattgcaaggaagggggcaaggagagaggaatatgggcactgagagcggtgagcagtaaggctgtgaagggaggaatccagaagccagggatgcagctgtcttacctattgataataagaacccacaaaccttcattacagggtcatccacgcccaggaaggattgaagaagggagacagaagagttctgtccgggctccctgtttctctcctgctgactttggtttggcttctcttctttcctaagaggaaccaacttctgctcctgccttgtcctccagcctttcctgaattttttaaattgtgtgttttcaactgtttcgctttttccgtcccctcttcttgcccaaaagaattgaagtgggaggtgtggcagggtcagttatggtgcggagaagagcaaaagcaatcctgagtcccttccctatcgcatcactcatcccctgcaatcctgctcccttccatgggctcccccaggctgtccctagttcactagaggctgtggcttaaggcaaagcaatggcagcttcagtcagctcgggcaagaaggtgaggccaggtttagggacaatctaataaacgtttcccacagctcagcctgtgacgtgcctccaaggaaggcccctgctcccactcaagcctttatacatgcttctgactgcagaaagtctgatcaaagcaacatgtgcctgcttccttctctttagctgccatatcaatcgcatcttggagtccccgcggggaaatgctctgctggttggtgtaggtgggagcggcaagcagagcctgacaaggctggcagctttcatcagctccatggatgtcttccagatcacactgcgcaaaggctaccagatccaggacttcaaggtaaaaggtcaggcagctgcagggaggaggctcagcttccctccaaccagccacagttccatcatccttcactcgttctccagttcccctgtctggagcctccccttcaatgtctgtccatttctgtcttaggttctgggctggtgatgtgaatgacttctcattagactcagcctgagaacagtggcatttccaaagtctgcctttgggagacctcaggcgtcctagttacgtctgtggggcctccactcttgctcaaatcagaagcacatctgtatcaaattcagcacacagctcactggcagtgggagcagacagatggaattctgaaggtctgcttgagtttcctaagaaattcagattttaaaagacgggtcagtaaccactggcctctgggaccttcagtgacatatcctggtttcagacagccagcacttggaggctggatgagtactctggaaagtaaagaaagacactatatacaaccttcaaaggtcattgtgtccagtccgctttgttttatccatggccacaacagtcttggtaggaagtcacggtgtaacttctatcaggaggctgctcttgctcttcctggaagaactccagccagcactgagccagtcctacccacttgccctcataatctctcagccagtgacagaagagggaggtgctcacttctgctctaaaaccacagcccagcctctcgacgactggctgaatctaaggtcatacatcaagttcgtattaggtctttctttagtgcttccaaaaaagacatgatagtgtgataggaattacacatttacagaatgagctgagactgtgggtctcaacttttactctatatgggaatcgctggggatctagaaagaatactgatgcctgtgtcccactccccagtattctggtttaactagtctggggaatggcctgggcatcacgatttttcaaagcatccccaagatgattccaatgagaactgagaaacactgtcttagatcacttagaggatgcgatgagaaccattgatctaaaacaaaaatcagtatatttaaaggggagctatttggacactaaggtagctctgtggtaaagaaatgagtggagttgttagaaatagctgtgagtaatgtgagagagagagaaaggcaacatcaagaactgatggctgagcttggggaggttgatacaccaaaggaactgagattgatcaagctggataagttcagaacttggcatcctagcccaaaatgtcatccatctgcagttttcaatgtatataatttcctacaggtgattgcatttgtgtatgtgtgtgtgtgtgttgccccagtatatttttttcaacataagtgttttgctggagctagtcataagaacacaagaggctgggcacagtggctcatgcctgtaatcccagcactttgggaggctgaggggagtggatcacgaggtcaggagatcgaaaccatcctggctaacatggtgaaaccccatctctacaacaaaaatacaaaaaattagccgggcgttgtggcacgcacctgtagatgcagctacttgggaggctgaggcaggagaatcccttgaacccgagaggcggagcttgcagtgagccgagatggtgccactgcactccagcctgggtgacagagcgagaatccatctcaaaaaataaaaaataaaaaataaaaactacaagaccctgctagcataagatatattcatccgccatgctggtagccccaagtacctcactctcagtcaagaccaagagcaatggcttgccttcaggagcaggtcattcagttgtttgagtcttacatataagtaagacgtaagacatacttacttatatgtaagtaagtcttccatatacgtaagtaagtcttccatataagtatgtaagtcttacatataagacttgcatataagtaagacacttgtatgagtcttatatatgtgtaagacagataaatgggggaccacctttgggctttggaaagctgtaacctctttgcacaaagcaggagctccagaagctttaccctaaagcctaatttctaaatcagtgtaagagaggtacaggagctagcatggttgtatgaattagaggccattgctatgtaatttctcttgcccacctttattggcaccaaagcctgggaatgaggcatagtttcctgcctgtcagtgcaagatagccctcccccagcttcccattgtcaccttactttaattcccattcaagcagagaagaaaacggttccatttctaaagaatgggttggagttctctttcaaggaggccttcttttcagagatttctgatattgaccattcctacagatggacctggccagcctgtgtctgaaagctggagtgaagaatctcaacacagtgtttctcatgactgatgcccaagtggctgatgagaggttccttgtgctcatcaatgatcttttggcatctggtaagagattccttgcacttggtgtcactgataaattccccctggaatcagagttatacaaaggtgaagatttcgtccagggtgggaagagtaaggtcatagtaatgaggaagaaaactgacacagccaaggactggttcattgaggtccttctcagcattgatgctgggcctgctatcctggctctttcattcttatttcattgcaaaacagacagtaatcgtggagctctcttagtgggactagacctgatgatgggaagaagagagggttaagagcttggtgatgtgctgtggagagaaggtgctgttccctctctgtatccaaatcaaagagaaactagaatgtgtgtagtacttgaggaagctcaggcattggcaggaagatacacaaaaagagagcatgagcatgcacgcgtaaaacttacacagtagggcaagatgaggttaccaatgtaattaactagtgatttacaacctcatgagagcaaagtggaagttccacatagttttccttggtccccaaaaaacttgacagagagtgtgaagtggcctgtgacgctgtctgtgcaagataggacttcaatggaaagctcaatgcttgctattgctattttattgtccttctttatttaggaattcagtacgtataccaacaatcccccacaaagtgaaaactcacgtctgtaatcccagcactttgggaggccaaggtgggtggctcacctgaggtcagtagttcaagactagcctggccagaatggtgaaatgccatctctactaaaaatacaaaaattagctgtgtgtggtggtgtgcacctgtagtcccagctacttgggaggctgaggcaggagaatcgcttgaacctggaaggcggaggttgcagtgagctgagatcatgccaccgcactccagcctgggcgacagagcgagactccgtctcaatttaaaaaaaaaaaaagaaaaaggttataaaacgagataaagaggcagggagaagagatcagtatgctggatcccatcctctgacctattctcttgatgtaagttgggtctgtctccccagctctcttatccagggcagtggcagctctaccgtaattactttacaaactctcatgcccccaaccagagatatggaggccataggtaactgatagtggaacctggtggtcacatccctgctgttgacccagcattcagctgactcttcctcctttcagtctcatcactccaacctcagctgtccatcaccccagagtgggtatgacctggtttatctgtcttacccatcattgctttttatatttcctacctcgtctctacctaggacgaagtctttcatatttggagaaatcccaataatctggcaataagcatcttccgtcaaaggtatattgttcctggacactgttacagatatgctctgtcctgctcagaaccaatatctccaatgctcttctgatgcaagcgcgagactgagactgcaaaaggcctgtaatcccagctacttgggagggtgaggcaggagaatcacttgaaccagggagatacaggttgcagtgagctgagatcatgccactgcactccagtctgggtgactgagtgagactctgtctcaaaaaaaaaaaaaaaaaaaaaaaaaaaaaaaaaaaaaatatatatatatatatatatatatatatacacatacatacacacatacatccaagaatataagacaatataatgcataaattatgcatttatataaatatgtgcatgtttatattaaagaaagaatacgctttcttggctcttaaaccaaatgcagcatctacaaaaccacctcttcatctcaattgagaaaacagtcagtgtacaaatgttcctgaacaaaatttctgcctccagacttccagcatctcaaaagccttctctctctccacactccattccctggctctgattaaataatgtttagtttataaggtccaaggaccatggtcacaagtacctttctccatagtctatctagtatatatagatatagtagtatatagtctatctactatatattgtaagtaatatattttaggatagttcctgacaacctccaggaagttcctggctttggaatcattgtctgcttcatattttgtggcattgcaccccatgccatcatgctgtcattttcatgaagagccactggtccctggtccagagcatgtactagcaggcattgtgagcaacctttggcttctttcaggtgagatcgatgtcccaggtttcctcactgtgctggctgctagccttgcactcataccaccctcattcccttccctccctgccctgttcaagttagctttatatcagagagtttgcctaccaactcttacaccttttctcctccaatgccacaattttttcctttcttaaatgcaatctctttaacatctcatcaccttctgcaatagtgtttaatctacaacatagcctcatcttttattattttactaaataatgagagaaggatccaacttccctcctaccccaaagctaccctaaagcctaatttcaaaatcagtctgagagaatacagctttagagatgtcgggcgtgttgccagcctcacaccattgtatttcaattggctctaatccagccaggtcaccttttcctaaaataacatctgagacacagagttgtcacatttttaccaattgaaattttattcctcaattaagtattgataatttttcatttagaacacaactttttttcaagtgcaaacgaatttctaaagccctcccagtgaaaatgcaatcagccggttccaaagtcatggagttttaggccccattttaaggcttctatatattctttaaggaaaaaaaaaaaggtaaaatttgtgtatacatattcaagtggagatacagttaagatgaacacttttgtcttctaacccaccccctttttttcttaaccatttcaacagggagaattagagtatatcttggttctaattttccctatcaaataagtaatttctggccagaaagtaaccgactgccagttcagccaaagctgcggggatgacgcagaacctcattatctcccaactttttcaactttgtggggttatgcaatgactccacccttggataacatagtagggactaggaaaccataacttagacaaccttgcaattcactcatccctctgtagttatgtacaagtcctacgaggttggatataaaggtatagtgaatgcagttctctcccaaaaacatctcccttggaaaaccaatgatctcatgccctgggcggagtttcctctcacacttctttatctcaccatttcatttcttgttttcctgacaccatttctaaaatcaaaccatgatagtaatttggcttatgaatctacttctgacacgaactacagcatttcagaacccatctttatgccagttgtatctcagatggattatagatggacatgaagaaatcttacacacaaagcaaaaatattaaattaggttcctggtttaattagcaaaagatacataactgtataagaactagagtggctgcccagggtaagagcagatgaaccacatatttgagtcacttcccttggctgctggggtccttgataggggtcatgcaactgctggtgaaactgtgcatgaaatgtgagtccttgctggatctgaaaggttcattactggctatgttcttattgacctgctataataattcctgaggaatgtgcactgatcatcaaacccaggcatttaaggaattcttacaaaacttgttctctttttgaccttcacttaaactcaacttcagcaagtccccactctaatttagagggaaaaaaaatcagaattattccctggctttccaggaaaacacctcttcctccagctttccagccttccagaaggcccattttactctggtgcccctgccagttagcactaaccagctaagaaaacctagtcagctccaagtgtgatgtttcttccacccctagctatgacagattttgtattttattttattttggaatcctatgttaggattttccttttgctttccaaaaggctgaattgttttattcaaaattataattcattttcctgtcccaggctagatgactttctatgtattcatatattcaataatcatttactaagtgtgcatgctcagtcactaggtactgtgctcaaagatgaataacatgtaacctctgtgcagtctcatggaagagtttataaccaatggggtccctctcttctaaagtcatattcttctttatctctaaaccaaactgttctttttatatatctgtgggccaaatctcctcttaggatctagaacataaaaagatccacctcatatcctaggtgctttaggattagagctagggttgacatgttagtgttcaacacacatcctatgagaatgcagagcccggaagtgtttataacagacttggcattggattgttctcctctggtggccgtctggaactggacttcctgaggagccatctatgctgttaaataaattgaattctggcccagtttccctagaaagaaaaaaaaaacaataaagttggggcaaaaaagcaaccatcaagcatgcactgatcctctaagacatacttagtggactcattagatctgctcactggctgtgccctcaaaccacagacagtggaactttaaaccaggaccggtttggttctccagctgcaaaacagaaactcccaaagagcaatgcaaaaagaagcatgagcaatcagacttttcttttccttttgtggtaataaactgtttttttttttcttgtggaactgaagtcctatacaagttactcaagagactttgtgttctgtggattccctatattgctaacctctcccttaccacctatgtccaagagataatctattgccaccaattttccccttatctatttctgaatccgtatcttctctatcctcactaccactggttttgccttcttttgccttgacaaacgccaacactccttaacttatctctctacttcccatgctatccccactccaatccattctcctcactccttgcaaaagggtctatctcaactataattcctggccaggagcagtggcttacacctgtaatcccagcactttgggaggccaagatgggcgggtcacttgagccccagagttcaaggccaacctgggcaacatggcaaaaccttatctctatgaaaagtacaaagagtatcggggcttgatggagcgcacctcaggtcccagcaactcgggaggctaaggtgggaagatcgcttgtgcccaggagcttgaggctgcaatgagttgtgattgtgccattgcaatccagcctggctgacagagcaagaccatgtctccaaaaaaagaaaaaagaaaacaaacaaacaaaaacactgtaatttttttattagttcccaactggttgcagaatgaactccaagcttctttgtcctgtttccttccttccttgctagtctcacttcccatcttgtgatctagtgattcctaattccttaaggtaacacactgtgctacttgctgacatccttaattgcttatgctgttccttttgaacctcatgcccttctttgtctggattaacttctacccacagtagaagacttaccttaggcgttccctctctagaaaatctagagacagatccactgtcactcttaggaatgagttccccatattcctacagcactcgatagctgcacgtaccaccactgtattgaaacgagattgtaaatttatgaaagggagagaccattgtgtttgctgttgattaatttacgttattgaacaatccagaaatacaaaaaaaagaaggattaaatggctacttctcagtttaggaaatacagcaacactgatatatacctattactctgtgcagagtcttgtttttcatcgtttatacggtcagctcttaatacatctcccagcccataattgacatttaggaggtacttctttaagtaaagtaagtaacagcatgagaatgatgtgccattaaatactactattggacatgtgctttggaaagttttccagcagtgaagacaaagggacagagtactgaaatagccaccacactcacttgcgttttctcctttaagaatagggaaatttttttttaaactatcaggtctagatagggtcaaagtcctcacaccagtgtgaagtttagaatctagcccttagcttcaccctttttatcaccaaagtccaactaactaaaccacgttaaattatcaggatctctttcctgaaaagcagctgtggcctttaaggagtcccatactaacatacagaagatggcagaagatggtgaatagtctggcttccaaactattagaatatttcaatactatttctaactccaagtactgcatgaagcctgaaagtacttggagttacaaatagtgtttcccaactttcggtgaaacctcgtatctactacaaatacaaaaaattagccgggtgtggtggcaggcacctgtaatcccagctactctggaggctgaggcaggagaatggcgtgaacccaggaggcagagcttgcagtgagccgagatcgcgccactgcattccagcctgggtggcagagcgagccgtctcaaaaaaaaaaataataataataatgtttccgaactttaggtctcaggaggaaacttctcaaatatttaaatagcctctgcccctgttcacatcacaaaatcccctctggcagttcagtttcctgcttccagcatgactacctacatcacaaaacaagtgacgagaatattgtcaagaaggaattataggaacaaatatgaaaatgcaaattttgttccctattcagaggtgtttatctccagatattccatccgatggtcttcttcttaaaggttctagggatcttggatattgtgacaaataccaccatcatttgagcacggaaaatgtctctaagtggcccaggtgctttcaacgtcttggaattaagagtattaataaaccagggtcatcaagttttttctataaagtgtcaggaagtaaacattttaggctttgcatatcatacagtctctgtcacaaatactcagctctgtccttgtagggcaaaaatagccatagataatacctaatgatcatggctatggtcaattaaatcttatttatgaacaataaaatttgaacttcacataatttccacattccattaaatattattatttaaactttcaacacatgctaaatattttattttcttagcggttttccttcactcctatttttatcagaagaggctgaaatgagtcattctattagtaagatcttgattttgacaaattatagtacaggaattttatatgcatgtcattaactatctcaaagaatagaaattaaataagttggtacaattaagagaaaacagtaaatgatcactttcatgataattcatttttttatttcaaccttttaaatgataaaagctaattagtatgaaactcttagtagactcctaattggtttagtgctatcaaaccatgaagtccgtaatttgctggaaagttggcatgagtttcctccagatacagtagttcaagaaagtgcagcagcttcaatgactgatacaatcacaattactcacactctgattattactgatcatttgccagaccactcactttgaggacctcaccaaagtccataagaaagtgggatgggccgggcgtggtggctcacgcctataatcccagcactttgggaggccgaggcaggcggatcacaaggtcaggagatcgagaccatcctggccaatatggtgaaaccccgtctgtactaaaaatacgaaaattagctgggcatggtggtgtgcacctgtagtcccagctacctgggaggctgatgcaggagaatcgcttgaacctgggaggcagaggttgcagtgagccaagatcatgccactgcactccagcctggtgacagagcaagactccgtatttaaaaaaaaaaaaaagaagagaaaagaaagtgggatataagatggcccaaatgacttctttcatcactaacattcctatgatgctaacatttctgtcagttacagaagaaggtaaaagcatgtgtgaacagcttttaaaaaaaattttacaaaagcatcatgttggtggaaaacaactttaaagaagagcttgtatatgattccagtcccagataacttcaacagctacctaaagacttgttctagaaatgggaaaattttgtttttctgatacccattgcttttctggagtgaaccacattcacctttacatcatatccattgttttcaactttttagctatagtgtttcgttcattcttacctccctcagtctcatctttttcattgagaaaactgatgtcatttagtttgggcctcacagctactttatacatcacagtctgtctccattattactattattattattattattattattatttgcagttttctcttttcctccattattaccattcctcctttccaaggtcaacttttcgtctgagctaggagcccgcccctacttcctaattcagaattttattctattccatcttttctttcaatttctgactctccctcttctctgatttcaaacatagcccattatctccatcctgaacgttttttaattaactttctttgacttgaagtgacagccaagcaataatcctagaaccttccccagacaaaattctcaaaagaatacaatttatttccttgcgaaacaatttggacaattgtttttatatagtgatctaattatatatttagaaatattgagttcatggagggatgatgaggtatcaccgctttcccaaaaatgcagtttcaataagaaatcaaatgggtttctttcttaattctgacaaatattttaggatatattttttatcaatattgaattatcttaacataacttattaattagtccagcccttgtctgcctcctgattttttttttgagacgaagtcttgctctgaagcgcaggctggagtgcagtggcgcaatctcggctcactgcaacctccacctcctgggttcaagcgattcttctgtctcagccttctgaatagctgagactacaggtgcacaccaccatgcccagctaattggccaagcaggtctcgaactcctgaccttgtgatccgcctgccttggcctcccaaagtccctgcctcctgatttttaatatcaatttcctaaaatttttatggaaaagcaaagaatgaaaaatggcaatgttgagaaagaaccagaaagagtgatttgttccactggaaatcaagtctccttatgaagctatcttagttaaaacaatgtgaaattgacacaatttggacatgactaaaagcaataaaacaaacaacttgtgaatattctcttagattttctatgtagaaaattaggttttgaacaataatagttttattacatccttaaccttaaacattttattttattttttcttaattttttgcacggtttggggcctcctatataatgataacaagaaaacacaatagcaatcattttttgtcatattcttgatttgaaagagaatattttagtattttactactaggtatgtttgctgtgggtttgggggtgatatctattattaaagagaaatctcatttattcctagtttgctaacagtctttagaaaccttatgcatccatttcaatgtcatattgttttacttcgttaatcaattaatgtactaaattattttcatagttttttttctagtgtttatccttgcatttccgggacagggtttacacttggtcatcatatactaatttatacatatttagttgggattttttaaattgttattcatcagggagattgagcatttaattttactttcacatattgtctcattaatacagtgttttcatttaactttcagatttttgccaatctgataaaaaaaaaataaggtgtagttttaatatacattttcattaagagtaagattgactgtccttgttcgttaacctcatttctacaaacaaaaagtaactaagcatagttttgatatacatttctgttcttatgagtgaggtgaagcatctattaatatattcaacagaaatttttatttccttcaccatgaactttcttttcctctccttcaccccatctatctattgaattattgatttttttctttatttgtagagaatttctttacatactaagattaaccactttactataatctgagttaacatattttcttagtttgttctttgtattttgctatcattgctatactttgcctgtgatattttcatcatgaaatatttttatttttatgcagtcaaatttgtcaattttatgcattcatgaaatttatttttcttttaacacaggttgattcagatagagttagaaaatccttccccactcagagattatttcccccattttttctcttatttccctgcattttttatagttaaatcattgattcagttggcatttactttagtgtgctgtataagatcaagatctggccaggcgcagtggctcatgcctataatcccagcactttgggaggccgaggcgggtggatcacctgaggtcgggagttcgagaccaagcctgactaacatggtgaaattctatctctactaaaaatacaaaaaaaattagccgggcatggtggcgcatgcctgtaatcccagctactcaggaggctgaggcaggagaatcacttgaacctgcgaggtggaggttgcagtgagccaagatcacaccactgcactccagtctgggcaacaggagcaaaactctatctcaaaaaaaaaaaaaaaaaaaaatcaacatctaaccataattttttcagatcccagttttcctaatgcagtaccatatattgaagttaatcttttcccggttgatttaaggcgtcctgcttatcatgtactaaattccatgaagccattctgctttctcccctttttctctcataaacagtgatagcttgctctttttaaatatatggacctatctgtatgtttgttatggccctttttgccgggggtcttttaggtattttggatcctattagccatgtttcctgctaaatattaaactcctggagggcacaatacaaaaagggcaaaaaatacagtagatgggaaacaaatgctttgagcaaaagaaaaaaagactgttgaaggctcttgtgttaccaactgtctaccccaggacaagagggtaccctacactctgttccaatcattaacatactcgttcttctgccctgggtttggagtagacatggtgtctgtccagcttcaccagcaagagagttggtacatggcctaaaaaccactgacctgtgtcctaaggtaggataacttcccatgtctgattgcatcatttaacgagatgccaaggctgcctatctgtgctccattttttcccaggggagatcccagatctctactctgatgatgaagttgaaaacatcataagcaatgtgaggaatgaagtcaagagccagggtctggttgacaacagagagaactgttggaagttctttatagatcggatccggcgacagctgaaggtaaagagcatttactgacaggggcaggcagagacccgagatgattcatgggagcttccactgatatttcgggcacaactgtccttattgattgtctagagtaggtggtgagtgtgcggcacccttctcagcctgagcacagttgccaggacacccttctcatctgctttaagggcagcagcatcccttgtggatcacgcagtcccagcgtttttgatctcttggctggtgaggctggctagcatttacagatattatctctgttggatgtgcttcccaatcttctgggagctagagaacccaaggccatatctgcctctccgtgagtatttctctgatgccttcctggttctccccacccttctgacttctcaggtgactctctgtttctcccctgtgggaaacaagctaagagtccgcagcaggaagttcccagccattgtgaactgcacagccatccactggttccacgagtggcctcagcaagcattggagtctgtcagcctccgcttcttgcagaacacagagggcattgaggtgagagagaaaaggagacactcctaaaagtccttcccagatgagggtacaatgaattccctgtccaggatgttagggttaaagatcaagcttgaagcataagtttccacatggtggaggaatggctggggtgaggggtgagcagttgcctccaatcttcaacacaagataatcttttcatttcttgctctttggttttagcccacagtaaagcagtcgattagcaaattcatggcctttgtccacacaagtgtcaaccaaacatcccagtcttatctgagcaatgaacagcgctacaactatacaactcccaagtcctttctggagttcatcagactctaccagagcttgttgcacaggcacagaaaagagctcaagtgcaagacagagcggttggagaacgggctgctgaagctgcatagcacctctgcccaggtgagcaatgtcccgctccttccacctgcaggggacttggagggagctgaagcagccctttccagtgaactggagggatcacaatcaagatctgaaaaatatgtacggttttccagagactcccatgtcatcagtatctattatgttctcgtgtgttgctttcatccctttggctttttttctctacattgtaggagagcttttcaagtttatccttgtccatagtaacagtatcctcaccatcagaaacagtaccaaaagttcaggctgagttccccagcagaagtgcatatgccccgctcaggtctgatccatccgctctcattgatgctggaatcccctgaagcacctcttccctcttcctctttgcaatttcttcgttttcctctccaattcacttcccttccatcctcaaaaccaaaagaaatgaatggtgaaaggaaatggggaatggctgcagggttatactatttttgtttgttttgtcttactctgttatttgtcaaagagccattggaacctcaatttttcaaaaagccctgtctcatttcatgcatctctaagtagtcatctatctctatctgagtagttggccatggaaagaaggcccctgtcggccgggcacggtggctcacgcctgtaatcccagcactgtgggaggtcgaggctggtggatcacgaggtcaggagatcgagaccatcctggccaacatggtgaaactccatctctactaaaaatacaaaaattagctgggcatggtggcgggtgcctgtagtcccagccactcaggaggctgaggcaggaaaatcacttgaacccaggtggcggagattgcagtgagccgagattgcaccactgccgtccagcctgggtgatagagtgagactccatctcaaaaaaaaaaaaagaaagaaaaaaagaaagaaagaaatcccctgtcatcctgtccttgttatgtttttctgtttacttctccaaatggaacaggtttatttcagtcaatttgctcatcttcccttgggagttggggccaactcttgcagctgcttcgcctctgctcacgcccatcaaatactgcctctttgatgacccctttctattttctcttctccagcagcagagccagcctctcattaaggtggcgaaatttcatgaatttgcacaattaaactaaaattgtgatccacctaattcttggacatcatgtgttcctgtagttatctgagcctttcattttgcctttggaattgttctattgaactttctccttttgacttgtccttttgcccctcttcaatttcttgattcagaagtattaaatgtacctaaaggatttaagttcatttagtgggatgcagtgagccctcgcaatctgtacacatagattttcttctgctcaggaagtggtccttctgtgatatgatttcactcgtcagatctggtctctcctctgggagcaatagtcagttggatggggtccctgtgccccatatctgttatgttctcatgtgttgctttcatcctgttggcttttttctctaaattgtaggagagcttttcaagtttaccctcaccaatactaatttaatagtgtgtaatattgcttcttcttcttaggcttgcaataaagactttaattatgccattgaatttttaatttcctaacaaccctttcgcattttatccttttcttttttcggtgcatcctattactattttattttggcctgtttttctgctacagtttcacagaaactgtcctactgataatgccaaacaggttcctccatgttttttctaggtctggtaatggatcgttttcagtactgtcttctccttctccttctccttctcctcctccttctcctcttcctcctcctcctcctccccctccttcttctttttccatgctattccattctttgctctgtggttttatatagacctttttttttctttatttaccttcaggaaacatgagatcacttcaaactcaacgtttgccaacaaatggcatgtgcaaattatctgtgatacccctgtctttccctttgtatgatgacgaaaacctcttcttaggattccagttcagggcatcgtaagctacacagatcccagtctaggtcctaggagtttacctttgctatagaaaggtaacatcttttctcctgatcactttctgtttgtttcaatctctgaatctgtagcaaacagcatagaatacaatctcagaatgcagtactaccagatttttaaaaacatcttccacctccccattgtgcttcctctcctcaccgcctaccatgccctcacaacattttccaccagccctgttctccctcctatctatttatcctctgggaattgctggcccatctgtttgaagaatggttgccaggaagtaagggataggaaaaatactttgatcctctcatggagcagaacccagtattctattttgtacagagcctgggtctttgagcagagactgaagaaagcacagtttctgtgttactgttgtaggtgatctctatttaacaaggagatgcctggctataccattaggtgactgcagctctagctgcacatagtggagaatcctcccaagtcctgatcttgccaggagccagcacaggttcttgtctttgccacacaaaagaatttgaaagcaagaccaaagtgatagtatggaagctttatgcacacactcaagagaggaatgcaggcatgctaaaaagaacaagccacacccagtgtggtcagagctcacatactatatggaaaagcataatgaaagcacaaaatattctataatgagggaagaggttttctaggaaataggcaggcaattcccagaatcaggacttttcttgactaaatatggttaatctggaactatcatggtgtcaggtgcatgatgggagtgggagggttccccatggaaattttatggtaataggacataatgaagccaaggactgacagctggtcaggtttttggccatcttggatttaaccagtttcagctggtttcttctttgttccattcttatctgtgcctaaagaaggatgtgtgcaatctgtctttattgttaagcctgttgtaacagttgcttcctactagggggtgggtccttgtgctaacctgtttggcctcgtttgcattgcttttagtcacctgcaagtaatcaagccgattccctgctgcctgcctcattggcatcagattcagtattggagaccaccaccaatgaccttcttaggttatattctctacttcaatgaatgatgcttctgctatccaattccccaggccggaagctgggggggtaattttagactcttccctttcctcagttcccacatttaaaaattactaagattactaagttctgtatgttttctttttctttttcttggtttttttttttttttttttttttgaggcggagtcttgctctgtcgcacaggctggagtgcagtggcgcgatctcggctcactgcaagctctgcctcccgggttcacaccattctcctgcctcactcccaagtagctgggactacaggtgcctgccaccatgcccggctaattttttttttgtatgtttaatggagacggggtttcaccgtgttagccaggatggtcttgatctcctgacctcgtgatccgcccgcctcggcgtcccaaagtgctgggattacaagtgtgagccaccgcgcccagccagttctgtatgttttctaaatatctctcaattctgtcctcttgttgagtccctactttcttttttttttttttttttttttgagacagagtctggctgtatcgcccaggctggagtacagtggtgcaatcttggctcactgcaacctccacctcccaggttcaagtgattctcctgcctcagcctcctgagtagctgggactacaggcacccgccaccatgcccagctaatttttgtatttttagtagagatggggtttcaccatgttggccaggattgtctcaatctcttaacctcaagtgatccacccgtcttggcctcccaaggtgttgggattacaggcgtgagccaccatgcctggccgagtccctactttcaacatcttgatttagacacttcttacctggatgatttcaacaaactgaactctcaatccagcatcacccactacctcttgcatcacccactatgtgaggccattcttgcattgctataaaatacccgaggctgggtaatttataaagaaaagaggtttaattggctcacagttctgctggcggtacaggaagcattgcactggcatctgcatggcttctgggaaagcctcagggagcttttactgataggggaaggcgaaggaggaccaagtatctcacatggtgagaatgtgagtaagaccaagagttggggaggaggtgccacacacctttaaatgaccacgtctcacaagaactcactaactcccacaagtgcagtgccgaggggatggtactaagccattcatgagacatatacctctatgtttcagtcacctcccgccaggccccacctccagcatttgacagttcgacctgaaatttctcagggatgtatattcaaactatattacccacacaggccaaagtccttgggatcatccttggttctttttttttttttcttgagatggagcttcactctctcacccaggctggtgtgcaatggcacaatctcggctcaccgcaacctccgcctcccaggctcaagcgattctcctgcctcagcctcccaagtagctgggattacaggcatgcgccaccacacccggctaatttttgtatttttagtagagatggggtttcatcatattggtcaggctggtctcgaactcctgacctcaggtgatccacgtccttggttctttttactctcctcttactctcacacctacacccaaaccatgagaagatcactattggctctgacttcaaaatacacccagaatcccaccacatctcactcctttcaaagcgctactgctgagtcatggatatcttttaccttcatagccacaagacccttctaactagtttatttgcttctactcttgcccctctgtagtctattctcagctgagcagccagagtggtcaatttagaacataaatcagaggctgggtgcggtggctcacacctgtaatcccagcactttgggagtccgaggcgggtggatcacctgaggtcaggagttcaagactaacctggccaacatggtgaaaccttgtctccacaaaaatataaaaaatagccaggcatggtggcatgcgcctgtaatcccagctactcgggaggcttaagcaggagaattgctcgaacctgggcggtggaggttgcagtgagctgagatcgcaccattgcactccagcctgggcaacaagagtgaaactccgtctcaaaaaaaaaaaaaatagtgcccgaacagagtgggcactcattaaatatttgttgaatgaataaattactgaatgaataacattctgtttcccagactgtatgctggtagcacactagaccagcactacccttgcatatttctgcatccttttcttcctcggttctaccacactgtaccctagagtccaacagtactcttgcagcgcccccaaaactctacgactggttcacatctctgtatctttacatgtacccccaccttgtcatcacttccgagacctgaacaatttgttccccactgctccagaagccctttctaaactctgagcagttatgcattcccttctctctgggttccatccttgaattatgtctccactcctgaatatatcaagctatactgctattaatccttcaagggcagggaccaggattcatttttcttttagcatcaggaactgacacatggcaagcactctacaaatgggtgaataaatggataggtgaatagatgaagggtggagaggcaaattaacactgaacaatcccaacatcacctgcgagctcagagtgggggtggagggtaattctcggcaatactgtgcacatggtattcattccataaacacttggcaatggttataataatgattcttctagtaaaaatggtatctatggttcctaactctgtaacaaactcttaatctgcagttgttcctttggtataaaaagactgaagtataccatcaaaatagtggtataaggctaaggacttgagttattttgtattggtatcctaccgcttgattatgagaggttttgatgctagtaatctggcgggaggaggctaaatgaacattatagccttagctcagataaaagacaaatctatttagcaatgataattgtgttagaagtaggaatgataattgtaataatgatgaaaattaacaattatattgtaaagttcacaaacttatttatttacttatttgcttatttatttatttatttttgagactgagtctcactctgtcacccaggctggagtgcagtggcctgatcttggctcactgcaacctctgcctcccaggttcaaacgattctcatgcctcagcctctgaagtagctggaactacaggtgcgtgccaccgtgcccagctaatttttgtatttttagtagagatgggggtctcgccatgccggccaggctggtctcaaactcttggcctcaggtgatcctcccgcctgggccttccaaagtgctgggattacaggcatgagccaccacacctggtcaaagttcataaactttagacttataatttcattattagagctgatcataaatgtaactttatttttctatagctgaattcaacatggctctggatccatcttattcatttaagagtagaaagctcttaatattaatcttgcattgcattgtgacatagtcacatcaagttaaaaacttagtctttggacagtagtcagttcagagttaaaactctcccacaggcctgtttccctctggagggacttttcctccttctcctctctgtggtggacttgggtttccaaaggcagctgacaaaacatcctggtgaactcctccagttctcactggctctggtggccagtgctggtcctaccagatctttaggtggcatcttctgtttctgcgtcaatgtcagctgaagtctcacagctggtgtcattgcttcctttctcttggcattgcctggtccccctttcctgagttaggtttcacttgtccctcgttggcactgctcacatgccactgtcctcccagcacctacatttaactcaggtgtagtcatgaggaaaagagggttgttggatagaagaaatgtttataaaagacctcaaggccattgccaattgcctgcatataggactcaatccacacatctgtcaatctggaaacttaaattcagtttatcttggggttttcaaatagtctcaggtcatcaaacttactgaagttgacagtttcataattcatgatgatgtactaggattcttttggttgtaactgaaaaattctaactcaaattcatttagtgagaaaaaacgaaaaatgaaaggaagggaagatgggaagggacgggtgggaaaatagagagaggaaagagaaaatcttgagattacatgatgtcgttatcaagacgtttttgatggcaaccaatgaaaatccaactgaagttggtttaggcaaaacaacaaaataaaataaatgaattcgtttgtataactgaaaagtcaaagatagggcttaatttgaacagggctggagctagagacttgcatgatattctgtacatcttggttttcccatagctgaagaatctctgtgacttggatactctcgttggccaaggcaggatcaaatgacagctggaataagccccactgaaactataaggatttggaagggagagttctccaaaggaaacttaaactaagttaccagaataaaggtgaacatttattaggcaggcagacattacaggcataggtaggacacatctatatctaaaaggaaagcttccttgaaattcaaattcatatcagaaagagctggatgactatatggacacagcgtaagcaggaaaatatctctaagcttctgttttagtcccgtttatattgctataaaggaatacctaaggctgggcaatttataaagaaaagaggtttatttggctcacagttctgcaggcatacacaaagcatggcaccaatgtctgcatctgatgaaggcctcaagctgcttcttttcatggtggaagggaaagtggagctgatgtgtgcagatatcacatggcaagagaggaggcaagagagagaggggagggagatgccaggcttctaaaaaataaccagctctcaagggaactaataaagtgagaactcactcacccacccccacaggaagggcatttatctcttcatgatggacccgcccccatgacacaaatatcttccacttgtccccacctccaacataggggatcaattttcaacatgaggtttggagggtcaaatatccagactataacagtctccagccctcagtgtagtatttattgctgctggttgccctgggcttcttctccttctatggcaaccagtgatgctatcccatctttccccaaatcctagagctgcctgaagaaagaaagttctcccccacaggcaatgcggggaaaacactccttttcagttcttctagttccttctcagttttatgcccaagctgactggagcactgcagaaacatcatgactgctctctttagcatcatgtgcctggttcttgaagaagggatggtcacccaccaccactgcattgtcatcccactcagtcagcaccatttaccaccatggtccccatcacccaccaccactgtattgtcaccccactcagtcagcaccatttactaccatggtcccgattcaggggaccagcagggctgagggaaagggtctcttctgtgtttatggcatgctccctctcaaccttcccatccaagtgtggttgtgtctaaataaggagacctccaaagtgtagctgggatgttttaaataagggagaagagaaagatgtaaagtaaccatttcaacttcccattctattgcagaaaagccataaaatggacctgagttatgccccttgtgaagcttggttgggggagccctaattctgactgatgggaccctcctgtcactccatgtcatggtttaagagctgtgaagctcctattcacagtgctggtggttatttaccttggacctgaggtcataagccatatctgcaatcaacaaaacaaaacaacaaccaaaaaaaaagccacttcaattttctcaaatctcccaagatttaaaaaggaacaaaaagttactggtgtgtttgctgactggagtgattatgccgctcaatcattttgatttacaattgcatctttgtccctgtagaaataactctccgcagctgaacaacaggagatggaaatggattaaccttccaacttgtgaatgtaagacaagttctagggagcaggcctccgtttgaggttaacacaaagtctcccgtttcaatgaatacacaaaattaaagagcattctcttttttccctttccttttcttttcttttgatctgccctgaaaagggaattatcaacagcgtgtaagcctcagttttatttttccccttgtgcattttgcatcataaagcactggaatctgtttgacgtgttccaggagctctgaagtaacctttggttgttgcgtgaaatagactgcagaaaaatgagaggcaagaggccattctggaatgtaaagtttatgggccgtattgcaaatacaaatagcttctttactttctagaaataaataggtctgtgtctttcctttgcatctgaaaaggccattacactaggccagtgactctcaaacttagacgggcatcagagtcaccgttaaaacagattgccacccccagaatttctgattcagtacatctggattaggacttgagagtttgcatttctaacaagtttctaggtgatgctgatgctgctggtccagggatcacatcactctgctgatctgaaagtagatagaaaatcatccttctctcccagctcatgagcagaatggaagttttctcaggtgctgatattcccatcactttattactgcctccaggtgtcatatgacttcagaggctgggctggatgggaaattcagctggcctgggccactgggattcttactgttcaactttaatctggccatctatttctagtaaggactgtgtaaataaatggagaccaatcacatgagaacaatcaaaggctatttattcagagcttgctctagcaagaaagtcagccaccattacttgtgcttagccactcaaaggcaggcagaaaagtgaaaaaactttatagtcaaaagagggaaggcttccagtgtgccctgcggtaggcgggctcactggaagtctgatgttctatgtgattggttaggggagcatgtttggctttctctgggtggtccacagttggaagcagggataaaaattaaggaaattgtttattgttaatcaagtcctggccatttggagccacttgctataggggtttttgtttgtcttcctgcaatattactagagatagaagtccgacttcctacaagtctgacttagcaagctggcttcctgggctggttattgtagaaaaagggttggttcctaagcaggttgcttcagattatggatcagaggtcagtttttatatatgttctatcattgtccacttggacattcagtctttcaggattcacagtagacattccctttttgtatcttgttaaatctttggcacactccacactggctacttttaattaaattatgactgatctttattaagggcctactatatgaaaagtattatgttaagtacatgaagctttataagcaatagctaccaatgtcagtgagaagcagcctaagctgttttggcatcagggagaaaggtcagggccgggtgtggtggctcatgcctgtaatttcaaccctttgggaggctgaggctgacagaccacctgagatcaggagttcaagaccagcctgaccaacatggtgaaaccacatctctactaaaaatacaaacattagctgggcttggtggcacatgcctgtagttccagctacctgagaggctgagacaggagaatctcttgaacccaggaggcggaggttgcagtgagccgagatcacgccactgaattccagtccgggtgacagagtgagactccgtctcaaaaaaaaaaaaaaaaaaaaagaagaagaagaaataaaaaagaaaggtcagggcacatgtaatttagaatattccagcacatttactatggtggagagaggacatcaagagttcctgggaaagaaacccaggtcagggagcctggtcccatctgacagcgcagctttgtacctttgtatcaggagctgtcatctattctgctccacagagttgggtcctcaggtcatgcccaacaggccagtgactagtccagtgcccacagtccctccagtcacaactcctgataagtcccgtgcttctccaatgcaggtggatgatctgaaagcaaagctggctgcccaggaagtagagctgaagcagaaaaatgaagatgcagacaaactgattcaggtcgtgggtgtggagactgacaaagtgagcagagagaaagccatggcagatgaagaggagcagaaggtggccgtcatcatgctagaggtgaaacagaagcagaaggactgtgaggaggacctggcaaaggctgagccagcactcacagcagcgcaggcagctctcaacaccctgaacaaggtaggaggactgtctgccatacctgctcatccctcaggggctggtagacgcagagaccaccttggcattcccaagagatgcaaggacaatgttgggagagtttagggtgggctccaactgtcactgatttgctcattaagcaagcaaacatttcttaggactatcttttcggttccatgagctaccaatgaaatcccggagatgggaatcttagaaccagacagaacatgaaaagtcagctgatccaaactccttacttcatgtatgagaaaaccaaggcccagggaggaggacagactaggccagacccataaacttaaatattagagcagagacttgaatttacatcttcaaaatctaatcccagggatcttcctgctccagtaacccaggaccattttgccctttaggttctgtgggacacacgagccctttaaggtttttatgttaaatgtttaagataagagaataaaataatatgttagcctcaaaatatactttttaatctataaaatcaaaattggtaagtaattaagtggcaaccacataactgtatgtcaactaaattaaactcataaatttactctggaaggaaggtggggagggcacgaggcttagccactcttttcttttctcatttttcacaattaactttttttcccacttggataaccatggttgagaggcaaaggtggaaggaaaagaggggcagtcagactcaagtcattatgagttggcaccagagatggacagaaagctgcccccttttctgttgagatgctcacatatgttttttggagatcctctgccagtcactggggacctcatccctacagattgctttctctgccttctcccgagagtctggcagttccctttcttccttcaaatgaaacacttgggcaagttctaaaacaacctatggcggctgagccatgcaagtggctcacatctggtccactggagatttccacaccacctttccctgaacaagctctaagaggccccccatgccgaatactctgcccacatgcctcggagctagcccgctatttgtatgcactctagatttctgggatgtaagttagaccccagtccaccgtgccagtcaaacttcaggagaaacatattaagctcactgagtagtctttttgaagtccctccttccatatttcatgtgaaaaggggtagctgccacatcctcccttgaaggcacagtgggtgggatgcaccagtaatcctcatggaagtttcctcttaatctctaacctcctgactttcttatatcctcaattagagtaaagggttgaaaagtcaaaaaagctaatcttctgaaaccttcttgaattctgcattgtcacctcatacctcacattggaatgtagcatctattgcctcagggcctcaactaggcacattgtaaaatcctattatagatggttataataaaattatatttaatgtgagatgtgagtgcatttttgtattttttatgatgtggcataaggaaaccctaaaagtaagggtgtccaagaccagtaaagttcttaaatgagcctctactgcaaagaaaaacacaagatttttccattaggaatttgttatatcattgggtaggccaggatcagaggtgtgacccggctgtaccactgtttctgagcctgaagctttcctacagccagacaggcttctctctggcccctcacagcaacactctgctcacctgtaggcctttaattagactgtacccacccccttcctcatttagggtccctctccattcattccgtctaaatcttacccaaattgcgaaatcaaccttacattccagatccatgccttctgtttctgatttccagaacacaaaagatagaaccactttatttacacaccttcatgtcttgttcactgatcattccttgccaagaagacaaacgtctttcataagttcttttcatacaggttttatatttcctaagatgactatcgttcaaatactagttgcactacttagtaactttgtggctctgggaataattttatcttctctgagcttgcgttttctcatctgtgaaatggaagcaatgataataccattcccattacgttgttacaaggattagtgtatgaaaagtagctaacagatgatagctacacagtaaatatttgttgttgttggtagtggtggtggtgatgttgtcataaccagaattatcacttctgtttccacaaaactgcaaacaaaatgaacatttataaatactgttggttaatttgattaattgatagattgaaataaataataggtatgtaacttgtgaagtgatggaataggatactgaaaatcacactggatttgaagtctagacaacagaagtaaaattcattttgaatgagtacctactatgtgccaggtaatatgatagatgctgtcctcgaactagtgtatagcttggtgcaagtcactgaagtccttgattcctcagtttcttttccctagtattagagaggggaaaacaggaattaacaggttctttatgtcactttacactcccatccaatctattaacaaactactttcaaaatatatccaaaattcaaatactttggatcctccctactgctaccactcaggtccaagccaccatcatctctgccttggactatggcaatagcccctaagttgctctctctgctcctacccataatccaacactgtctttgtccgttacagcaatctgagtaatctttttgtaaaacaggtgtttgaccatgtcatctctgtgttcagaatcttccatggtttcccatcacattcagaataaaacccgaagatgtcaccatggcctaaaaggcactccattatttgcctgtgccacctcttctgcatcagttactactcttccttttgccgttctactccacccacgccaaccttcctgctgggtctcaaatgttccaagcacagtctcaccccaggacctttgaactagtgcttgcctctgcatagaaggttcatcttccaactatctccatggttccccactcttctttcaagtgtttgcccaaaagtcacctcatcaggaagcaaataataaaggcattcattaatttcagaaaaaaattaagatatacaagaaagaaattaatccaaagtgaacaatagttatagtcatattcatgtgcatactgaatgttaatttaactaaaagtttgatataaccataatggggagagggaaaggaagtcagtaacggtaactaaatattcacattctacggtaggaagtcacttgataatgtcttaaatgaaaaagtagcagcataagcatgttctttatcagtaaggagtataatctagaagtaatggtgcagaaactgaaagtggtgacttccagagagacagaactggcatgaaatgggcatgtgttttgttcccagccttgtagtggtattacagcttgtaaactatgtgcatgtgttacattagcagaaataaaaattaaaaaatttcagtgacttgagatcacagaagaaggcatagtgaactgcctggccaggtaggaaatagggaagagaaaccccatgaagcagatagtataaagataagtattttactagatggagaaggtggtagaaaagaacatcccaggaaggaacgacctctgtgaagacccagatgaatgaagggtgtggtatatctgagctgtgggtacagaagtgggtggcttagaaggtgatgtggcaggggaggctctaaaggtgagttgaacaagacaattaacagtccatccgtcaccaagaagtttagctgtagaccggttcacaatctacaggtggcaatgcattactgggttgcaacagcccgtttttatgaaatagagtggtccatagtacaccacctgtagtaaggacgaatattgctccatgagcccaaggactcctcgactgtctttaaacccttctgcactcacaggactttggtatttaaggaccatttctctgttttctcattattttcaaagttagcaataaatctttagctaatacataaagaatacctataaatcagaggtgggtagtaagtctctgcacactttaagtctccattttggcagttttattttgtttttatagctgaactaaaataaatccagtataactttttctgccttcatttaggaatggtttatcttgcaatttcatggtctccctcccaccccctcaaagttacttggaatggtctatttatttcccatgcatctttttacagtgaacttatttcttcttatacaaataataggtaacagcatttttgttgctgaaaataactcaagggctgggcacggtggctcacgcctgtaatcccagcactttgggaggccgaggcgggcggatcacgaggtcaggagatcgagaccatcctggctgacacggtgaaaccccgtctctactaaaaatacaaaaaattagccgggcacggtggcaggcgcctgtagtcccagctactcgggaggctgaggcagaggaatggcatgaaccccggaggcggagcttgcagtgagccgagatcgcgccactgcactccagcctgggcaacagagcgagactctgtctcaaaaaaaaaaaaaagaaaataactcaaatagtatagaatatatagggtcaacaaaaagtcacccttactttccgcttcagcccctgacctctcctagtgatggctcctataataatttggagtgtgtctatttcagcagtttttctacacatttatgtttgtattaatgcacatataaaacaaatcttaaatacaaatggaaattaccaaattactttccctcctgttttactgtatgtatttaaggtatgatgcttttgatatgcatatacatagtaaaatgattgccacagtcaagcaaattaacatattcaccacctcacatagttatatttatgtatgtacagtgagagcacctaaaatctgctttcttagcaaatttcccatacgcaataatatgtgttggtcaaagtgtgaagaaatgggaatgcttgtgcactgttggtgaggatgcagattggtacagctgctatggaaaacagtatacaaaggcttctcaaaacattaaaaatagaaacagcatatgacccagcaatccctcttttgggtatatacccaagggaaatgaaatcaacacctcatagagatatctgcactcctttattcattgcagcctcattcccaaaagccaaaatatggagaaaacataaatgtccatcgacattatacaagaaagacatcctgcatttgcaacaacactaatgagcctagaagacattatgctaagtgaaatgagtcagacataaacagaaatacactgtatggtctcacatgtggaatctcgctttccctcttgatacaagattactttatttcatgccagtacatgtattgaaacctcatttatttaatgcttcatagtactctgtctaatagtactgcattctatttaattatttatctatttttgagcatttagtttacttttttcaatacaattttccttatacatatatctttattgtttgtgtgtaagaatttctctgggcaaacaagaagtataattgcttgacagaacaacatggtaggctaaataatgcctctcccccaaagagttccacatcctaatctctgaagcatgtgaatgttgcctcatataacaaaagtgactttgcagatatcattaagttaaggatcttgagacagggggattatctgggattatccaggtgggccctaagtaatcacaagggtccatagaagagagagaaaaaaggtcgggagaaggaagtgacgtgatgacagagggagagggaagaaaatattgtgtgatatggggccacgagccaaggaatcggacaacctctggaagctgaaaagggtgtgcaacggattctccacaaaagcttccagaaggaatcagccctcccaaccccttgattttaggacttgtgacctccagaatggcaagatagtacatccatgttgttttgagtcaggaagtttgttttaacttcttacggaaacaatagaaacctcttaaaataatatgctcttttttaaaaatacattctgccaagtttctatccaaaatagctgttcttacagttctgaacactgctcctcccacatcctggccaaccttagatatttttagtcacttcagttttactcaatgaaatgacttttcaaattctcacttttattttaactttaagtggtttcattctaatgagactgggtgttgatcaaagaaaatgatcaaggcaagtctcaatcattttaggaggtttatttgccaagattaaggatatgcccaggaaagaacacagagccacgagaaaaatgtggtccatgctttttccaaagaggctctgggaacctcagtgtttaaaaggaaaggagcaggtattgaggaaagagaaaaaacattttttaaagcgtgtgggtaagttaagaggcaaatggttgcatccttttgagtctttgttcagccattcacacgtgagaggagggtaggggaacagtcacttatgcgtccatcttgctcagtgaatctgcatttttacataagataatataaacatagggcagaggaagcaatcagacatgtatttgtctcaggtgaacagaaggatgattttgagttctgtcctttgtcccgtacctgtgaagataagctgtcaatttacattgtcagggtgaaattcaacagaactgttttaggataaagatcttggggcccacaaggaatttccttgtgggcaaattgtgagggaagtatgtagcttttttatctttgtagctattttatttaggaaccaaatgagaggtgggtttgcgtgacccagttcacagcttgacttttccctttggcttagtgagtttggggtcctgagatttattttcctttcacatgggcatcttttcaaatttttagatttctttttctgttcattacctactcagatcctatgcccattttctcacaaggtagttttccttctttttatttccttccttcctttctttttatacagtttctcattataaacttttgctatgagtcccttggtatatgtatgttataatattgttcccagtctgttatttgtcctctaacttaatattaacaagtaataaaaaaagattttaaaatcaaataatttggggaattctaggagaagtcagggtcttcattataagcttaatactaaaagtgatagatatagcacaagaaaataaaacctcagattgatctaacttattaatagtggtgtaagatatcaacgtgaaatacaagtaagttgactttagcagtttattcaaacaatatgccaccaactggtaaagttaatttagtatataatgctatttatgtatgcatacccaagcatacattaaaaagaaaagctttgtagtcactgtattagtcaggttctctagagggacagaactaataggatagatgtatatatgaagtggagtttattaaggagtattgactcctaccattgcaaagtgaagctccacaataggctatctgcaagctggggatcaaggaagccagtccgggtcccaaaacctcaaaagtagggaagctgacagtgcagccttcagtctgtggccaagggcctgagagcccctggaaaacaactggtgtaagtccaagagtccaaagcctgaagaacttggcgtctgatgttagagggcagaaagcatccagcacaggagatagataaaggccagaagacgcagcaagtcagcttctcccaccttctcctgcctgctttattctagctattctagcagtgctggcagctgattaaacggtgcccacccaaactgagagtgggtctgcctctcccagtccactgactcaagtgttaatctcctttggcaacaccctcacagacacacccaggaacaatactttgcacccttcaatccaatcaagttgacacttcatgttaaccatcacagtcaccttgagaaatgtcaaaatgatatttaacacaattcaacatctgttcctcattaaaactctcagtaaagtaggaataaaataatatttggctatttcgctagcagatgaaaaccaatcccaatccaggagcaaaacattccatctaatgacagaatccaagaggcactgtcattaacgtagagaaagtgcaatgacagctcccttcactactgtaattcaaaaatgtgtcctggatttctagccaatgcaataataaatttaaaatacttaatcacctaaatgttgtgaaatatcaaacataatattatttatggatgatataaaaaataaaagggaaagttaaggactcattgcaaaataaattttaaaatgcaatacctttcctaatatccacaatagccagttagaaaatatattttcaaaataacaaccaaaacatatggtacaaataagtgtaaagaaatttgttgaaactgtgaagaaaactacatatccttattgaaggatattttaaaagatatgaataaacatatatactttgtgtactaggagattcaattttgtaaggacactatttctccaatttacttaaaaataaaatactactctaattgaactccaatttgatttttggcatattcatctctactgttattaaaagttcttatcatttaaccaattattaaagatccaataacctacatgttcaataatataaagttagccaaataaattatgtatattcagatggaagaaaagtgtgcattgtttattttaaatcatatttgcaaaaataattgacaagaaaaactttcagattttattttcagtaaaacagtaggtttgaaattagtatagtgattgatatgtatatttgtatatatacatgtatatgtgtttgtgtgtgtgtgtgtgtgtgtgtatatatatatatatatatatatatatacacatagagagagagagaataatagagagacataaaaaagaaagctactgaatgaatcacaccaggacataatgttttatctctggttagtaaaattatgaatcttgttttttatctttgcttaatattccacaataagtatatactcttaataaatggacaaaacagtattatcttgtagaacagttaagaataataaagaaataaaactgtaaaagaactagaaaacttctcaaaagttttcagatcagtttttatgtatgtgaaaggtctttctaaatgcagaaacaaagaactatatttagaaaaggactgttaaatgtgacttcttaaaagctttaaatttctgtagatcacaaaataccataaacaaacttttttgcattaaatagaagtttaataatttattataatcttgaagggaaaagtccagattgtattttgatattttgtacattaatatattattacaacgtgaagaaagatttttttgaaattttgttttagtcatttcctttgaagccacatcatggtaacagagtctcactctgtcacccaggctggagtgcaatggagcgatctcggctcactgcaacttccacctcctggattcaagtgattttcctgcctcagcctccagggtagctgggattgcaggcgcacaccaccatgcccgactaattttttgtatttttagtagagacggagtttcaccatgctggccaggctggtctcaaactcctgaccttgtgatccacctgcctcagcctcccaaagtgcttggattacaggcatgagccaccacacccagccagtaacatctttttttatcatttaacttttaagttcagggtacatgtgcaagcttgtgatatagataaacttgtgtcatgaaggtatgaaggtttgttgtacagattatttcatcacccagatactaagcctaggacccaatactggcgtgagattgtatttcattgcggttttgatttgcatttctctaatgattagctacgttgagctttttttcataggtttgttggccacatgaatgtcttcttttgagaagtgtctgttcatgtcctttgtccactttttttttaccatctttttttttttatttattattatactttaagttttagggtacatgtgcacaatgtgcaggttagttacatatgtatacatgtgccatgctggtgtgctgtacccactaactcgtcatctagcattaggtatacctcccaatgctattcctcccccctcccccgaccccacaacagtccccagagtgtgatgttccccttcctgtgtccatgtgttttcattgttcaattcccacctataagtgagaatatgcggtgtttggttttttgttcttgcgatagtttactgagaatgatgatttccaatttcatccatgtccctacaaaggacatgaactcatcattttttatggctgcatagtattccatggtgtatatgtgccacattttcttaatccagtctatcatttttggacatttgggttggttccaagtctttgctattgtgaataatgccgcaataaacatacgtgtgcatgtgtctttaaagcagcatgatttatagtcctttggctatatacccagtaatgggatggctgggtcaaatggtatttctagttctagatccctgaggaatcgccacactgacttccacaatggttgaactagtttacagtcccaccaacagtgtaaaagtgttcctatttctccacatcctctccagcacttgttgtttcctgactttttaatgatcgccattctaactggtgtgagatggtatctcattgtggttttgattttcattgctctgatggccagtgatggtgagcattttttcatgtgttttttggctgcataaatgtcttcttttgagaagtgtctgttcatgtcctttgcccactttttgatggggttgtttttttcttgtaaatttgtttgagttcattgtagattctggatattagccctttgtcagatgagtaggttgtgaaaattttctcccatgttgtaggttgcctgttcactctgatggtagtttcttttgctgtgcagaagctctttagtttaattacatcccatttgtcagttttggcttttgttgccattgcttttggtgttctagacatgaagtccttgcccatgcctatgtcctgaatggtaatgcctaggttttcttctagggtttttatggttttaggtctaacgtttaagtctttaatccatcttgaattgatttttgtataaggtgtaaggaagggatccagtttcagctttctacatatggctagccagttttcccagcaccatttattaaatagggaatcctttccccattgcttgtttttctcaggtttgtcaaagatcagatagttgtagatatgcggcgttatttctgagggctctgttctgttccattgatctatatctctgttttggtaccagtaccatgctgttttggttactgtagccttgtaatatagtttgaagtcaggtagcgtgatgcctccggctttgttcttttggcttaggattgacttggcgatgcgggctcttttttggttccatatgaactttaaagtagtttttttccaattctgtgaagaaagtcattggtagcttgatggggatggcattgaatctgtaaattaccttgggcagtatggccattttcacgatattgattcttcctacccatgagcatggaatattcttccatttgtttgtatcctcttttatttccttgagcagtggtttgtagttctccttgaagaggtccttcacatcccttgtaagttggattcctaggtattttattctctttgaagcaattgtgaatgggagttcactcatgatttggctctctgtttgtctgttattggtgtataagaatgcttgtgatttttgtacattgattttgtatcctgagactttgctgaagttgcttatcagcttaaggagattttgggctgagacagtggggttttctagatatacaatcatgtcgtctgcaaacagggacaatttgacttcctcttttcctaattgaataccctttatttccttctcctgcctaattgccctggccagaacttccaacactatgttgaataggatttaatgaggtggtttttttcttgtaaatttaagttccttatagctgctggatattagacttttgtcagatccaagcttgcaaaaattttctcctattctgtagattctctgttcaccctgttgatagttttctttgctgtgcagaagctctttagtttaattagatctcatttgtcaatttttgcttttgtcacagttgcttttggtatctttgtcatgaaatccttgctcattcctatgtccagaatggtattgcctaggttgtcttcttgggtttttataattttgggttttacatttaagtctttaatccatcttgagttaatttttgtatatgttgtaaggaaggggtccagttttaatcttctacataatggttagccagttatctcggcaccatttattgaatagggagtcctttctccatgacctgtttttgtcaggtttgttgaagatcaaatgggtgtgggtgtgtggccttatatttctgggttctctattctgttccattggtctggtctatgtgtctgttttggtaccagtgccataaacaaaattttaaaagaaattttcaacacatatgtgaaaagaataaatcttctctatatatgaaaagctctcgtgaattgtactgggaatctcccattcgttctgctcccctcctcttattgcccccaacccagttacactttgcccttcccaactctgttctttccctaacctgagagacttgatttgcatgaattatatcaatggactgcctttgccctctaggtttttgtgacctttggccatgctgagtatcagaaggtcataggaaggagaaagagagtgagatcccggtagtcatttcttcggcctccacctgccctccactaacggttacagctcgtgtagggctccttctccagagggctctctgtctctgtctctccaggttctgctaacccctcctctcccttttctcctcaagcccagagtggaactggaacctccccagctccactcaccctaacattactagcccagagtaatgtactctctcgtaggtctcttcaatctacactttcataaatagttcctttagttaactgtcctcaaaagagctggtgtgttgtatcatcattttgcctgcagaaaccctaacaattacagtaatcaaaaagaaaaagataaatagcccagtagaaatgtaggcaaaggacaagaacaaacaactcacaaaataaaaactccaaatagtttgtcaacatgaaaaaaaagtttagcatcactagtaaatacacatatatttgcataatatgcatacattaattaaaccaatattgtgatcttatttttaatctatccttttttttatttaaataatatttcccagtgttgaaaggatgggagtgcatataggttatctcaaatactgatgattgggattgaaatttctgagaaataataattattactaataataatttaataaattgaataattattgaataaatcaaataattgttaaataatttaataattattaatgacaatttgtacaaagaatactaaaaatgtttttaccctttgacccggcaaatcccacttccaagaagattgccgtaagtaactaaaattttcacttacatagaacaatgttcagcaaagcattatctgtgaggtaaattctgggaaatgacttacattttcagaaattagataaattttagataaagtgtagattgtccatatacagactttttaaaaatcctctctagaagaactagtgaccttctctcacacctctttttttttttgagatggagtctcgctctgtcgcccaggctggagtgcagtggcatgatctcggctcactgcaagctctgcctcccgggttcacgccattctcctgcctcagcctcccaagtagctgggactacaggcggctgccaccatgcccggctaactttttgtatttttagtagagacagggtttcaccgtgttagccaggatggtctcgatctcctgacctcgtgatccacctgccttggcctcccaaagtgctggcattacaagcgtgagccaccgcacctggccacctctttgtaaaagtattcataagttctgcctacactagctcgaaaatatgtcccaaatccaatcacttctcaccatctcccctgcaaaaagcctggaccaagccaccttcagttccctgcctagatggctaagctacctcctgactctcttgttcctcatccactctcccctgccacagtgtgtctgcactgcaacaagcatatctgagagcataagcctcatcattccattccctgccgaaaacacaccagtggcttcccagtgaaattagagtaaaatccatactcctcatacttcttcccatggcctccggagcctctggtggtctggccccagctgcctctcagccatcctctccaccactctctggactgtcctccccactgtacatcatagccaagcttgcttctgccacaggcctttacacttgcttgctcagcagcctggaacagtcttcctgcagtctgtagagctggccatttcccatcattgagatcccagtgaaatgtagcttcttgaagatgccttcccagaggaagagaccttcctaactaatgtggcatcatcacattccaagaattctctctcctgagcccttgtgtttgtttttctcagtatttaaaatatcaaagatctatctctttgttgcctgtctcccccacctgaatgagcaaaaggactttgcctttcttgtatccccgtcactcaaactgaatgcctagtacatactaaataatatttgtccaatgatgactgcacacatattgattcattcatttattcactcaacaaagactttttgagtgctcttcctatgccaggcactgctctgggtacatgtgatacatccatgagggaagatccctgcctctctgaagcttatactctagcagaagtaaggggcaagagacaataaatacaacttcaaagtgacttatataatgtagtagagcatgacagatgctgtggggaaaaaagaaaaatgtggagtagagtaggagaagcaatgaggctgggcatctggagaggatgggtgggaggaggcagaggtggtaggccttcttaggaaggagacgtctgagaaaaacttggagaagaacaaatgcatcgggcagatatttggggaagagcagccatacagctagaacaatagtcctaagacagagtggagtggagcccagagcgcctgtgcctaacaattcctgccttctgagaagtgtttctcccaggctaggcatggcggctcacgcctgtaatcccagcactttggaaggccgaggcaggtggatcatttgaggtcaggagttcaagatcagcctgaccaacataatgaaaccctgtctctactactatacaaaaactagccaggggtggtggcgggtgcctgtaatcccagctgtaatttgggaggctgaggcaggagaatcgcctgaacccgggaggtggaggttgcagtgagccaagaacatgccactgcactccagcctgggcgacagtgtgagactccatgtcaaaaaaaaaaaaaaaaagtttcttccagccttgtgtttctattagcaccacgctgctctatctgcctgccccatgagagttgacttgagggcccatgcttaaccaaacaagatctttacccagggattttttaaattttgacttgcattggataaaaagtctctttcccttctctttccatccaatcactcaacacatattttgacaagcatttactacataatttcttctgttctggacactggggcttccatggttaacaagataaatggaggtccctgctctcatgaagaggagggatacagtaagtcaacaaggaaaaactgagaatcatttcaggttctctgaaggaaaccatcatggctctaggatgggaaatgactaagaaggggaggttggtgggtagagtcttacagggtgggggtcgtttaaattgaggttgttttgttgttgttgttgttgttgttgttgttgtttgagatggagtttcattcttgtcacccaggctggagtgcaatggcatgatcttggctccttgcaacctccacctcccaagttcaagtgattctcctgcctcagcctcctgcctcagagtagctggggttacaggcgcctgccatcacacctagctaatctttgtatttttagtacagatggggttttcaccatgttggccaggctggtctcgaactcctgaccttaggtgatctcccttctcagtctcccaaagtaccgggattacaggcgtgagccaccatgcccagccagaattgagatcttggtggatgcagaggtatcagccatgcaaatgtcttaggaggaagtgttccaggcagagacctgaggtggcaatgagcttggcaagtcaatacactgaaagaaggtgatcacagctacagcctagtgagaaaaggagaaagtgggccacagtcagagagttagaccgtgtgccttccaacatgaagaaactggggtgtaaaaaagcaacccacacacagggagacagggaaggaagagaaagtccacagagccctgccgacaacattgagaatgggattccactcatcatactgccagctccatgcctgcccttgccagatattcgagtgagaaaatctccctgtgtacttcatctagggtttctgtcactaaaaccaaaagagtcatgattaatttatagatatatatgaatatgaaaaagactggaaggaggagttactgtacgtggaaacatcgaccgtgatatatctgggttataaaattcattttcatctctgtacattgcttaacttatgctgttttaaaatcatggcattctttggttacatttgtattttctcactttgccctctgtcacctcagggggccgtgacaacaggtgtgctggtatccctctcacacctgtgctgcctacctccctgccctcacaggtgtattgggaccaaatgtgaaatccattgcaagaatgaaaggagcatctgccacagtacttccattcggagctagaaataattctctttgtttgtggatcaagagcacctcaaattaatttggcataagaatctaatttttgaaatcaagttgtccccccactgacaaagttagcgccataagcaaatggtttcacagcattttaagagcctccagctacattggggctccactgccctaataggaagtggtagggagctgggcgtgggagtctgcaatgtacctttcacggatatttctttcacctggcagacagcctaatgcttagctgtctgacccatgaccagggggtccttcacatgggaaatttgtttatattggcggatccccttgtggctcttgtccaatccatgtccagtttatgcctgcctgaccatcactctgagctgggagctcagcccagtacctggagaaaacccagcctggagcagcccctggttcttcagatggaaggtgcaaattcagtataccaccacaacaggaaacacattcaaatatttttacttacagatcctgagcagggagaatgcaatgagttgggagggtagtgctctgtccctgggtcacgacaggtaggaatgaagagtgaggcagagagaaagagaagtgcatagaagtgcatggcaaccggcagtatatataagagatatatataagaaagtgtgtgtgtgtgtatatatatatatatatatatatatatatatatatatatatatatatgaaagtgtgtatatataaaagaaagtaggatgtgtatatatatatataaaagaaagtatatacaagaaatatatttctcatatttaatataagatatatcttatgttaatatataagtatatataagaaagtaggatgtgggtcactttaggttttcagcaaatgcctgaatggtccctttaaaggaagtggcaggcaagcagggagctcctgcctaggagagatccaaattctctggctactggcttgagtcatttgggtgtggtatagaactggaaactgtatccagggtaactgagccctgcttctggtatgaataaagttaaacctatattcaaaatggatgcccaagcaacagaaaattagaattccctacacctgattgtaggcttctcaccgaatgtcatagcaggccttaaatcaacttcatacgcatttatgacaccattttatgtacagagtagcgagttctcctgcccccaatttacagatgaaggtggcaagttctggaaggtttaagtgatttgccaagatcaactctttcagccgtgtctttctggaacaagcaaaactctgagcaaaggacaaacccaggaccaggcagagcagctgactcacaggctgtgccttgtttctgtctgaattatttcttggcagaaaatgctgttttgctatcaggacagtcaagtgtagttagaacaagctcatggaacaaagcagtttaattaaggaaaaaaaaattacttgggttacagtgctattctcttcaatccaagatggaaattaatttataataaccttatcttttattcatagcatgctgcatatttcagagtatgtcggcatccttgtatttctcagttgaatgtgaaataattgtgtgtttctaatgggctgcgagtcagttaaagtgctgaaagaacatagctgagtcttggctaaccattcagagaagtctgaagccactgaggagtagctttggtttccttttgatgagtcatgatatttaaaattcagagggctgctgcaggcttcaaagcagccctttcaaaccgatcgctccacaacctaactccatcagtggcagaggacaaagaaagcccattcatgttcccctaaccacctccttctcttttcccagaccaacctgacagagctgaagtcatttggctctccgcctctggccgtcagcaatgtcagcgctgcggtgatggtactgatggctcccaggggtagggtgcccaaggaccggagctggaaggctgctaaggtcaccatggccaaagtggatggcttcctggactcgctaataaacttcaacaaagagaacattcacgagaactgcctcaaagccatcaggccgtatctgcaagaccccgagttcaatcctgagtttgtggccaccaaatcctatgcggctgcaggcctctgctcctgggtcatcaatattgtgagattttatgaggtgttctgtgatgtggaacccaagcgccaggcactgaacaaagccaccgcggacctcacagctgcccaggagaagctggctgccatcaaagccaagatcgctgtgagtgaccccagagcccctcaccctgctagtccgcctccaatacaaacaacgctcttcagacaccatctaacacctaacgttacggtttttaaagagaagcaggaaaaccacattttcatgcaaaatctcatttttcagtagaggcaactttttacatttctttctcaaacactgtataggccaaacaagacaattccactggaccactggtttacaagctgtggtgcgaaaaggttttctccttttctgaacaaaaggttaaaattttgagactttttctctttctccttggaaatgtggattttagccaccttaccctttttacctgttcccttcagttctagccaactatctgcctgtctcactttcagtagcatggatgtgtggaaatgtgtcagctatctgcattgttttgtggaagttcgttaaagcaagttatacactgtgacttagtgggtggcccctagtccataaatataaaactgtgagggtcattagcttttataaactcatgtagatattgttattatgtctgcttcacccaggatttggagatggggatggtgatcttggattcacacctatttgggagattttccttgtcaacctgaaataattgaaaggatcagaattcatttttttttttaatctgtagaggcagggtctccctatgttgcccaggttggtcttgaactcccgggctcaagtgatcctcccacctcagcctcccaaagtgctgggattacaggtatgagccactgagcccagcccagaatccagcttcaagagttgatttaagtgaaaaactggcaatgaactccaaagagatagagtgagtgctccaaagtaaaacgttaaggtgttacttatataggcagaaaacaaagaaattttctataataggctggtttatgagttacaacaatttaattaattacagttttctgtacagcttgtttcacttcctttccaaagagtgtatttaaccttccatcttagataatgtggagtctttgtgtgagaaaggtgaaagagaggttaatctataacaaagatcagcaatgaagctggaaggagtcttccctggtgccctttagtcatttgcaaagttttacaagacaatgtaggtaaggaaaaaggccaatctataatcagagaaataaaggttacaactgcctaggttatagctgcctgtcctgtgactcgagacctataatcacattaccttaaggctcaaaatattttaaagttccaacagcttagatcttgaattacttactttcatatgcttgaacttcaccttgcccataaaaatgcatattaacaaagtaacaggtagaaatcagaatcctggaagatagcatagcaactaagactccatccttccacatagcttagttccaatccaagctgtaatatttactgatcgtgtgacctttagaaaggtttccaaaatgcccaaaccttagcttcctgaagtagaatagacacagtaatagtacctgcttcatgggactattatgagaattaaaggatgtgatgtgtataaagcatgagactagagcccagcccatgatgaagggagcagcaggagctgcccccctgctgtgtgactataactgctcaaccactactgtgtgagcgtgactataactgctcaactgctactgccccatttgacagcatgtgccatctaccacatgcacatccaacctcttgcatggactcaatcacggctgtgatcaagttcaatccaaaaaattttctggatctttaatttctgtatgtgcattctaggcaaataagattcttgctacaaatttgtcatgatgataaggaggattttacaagttatgaaaggtaggattgtagacatgctgtatgccacgtgacatgggtttattgattgttagattaaaatctatggaaaaaggctctagatcaaagatccttgagaccaatctctctatttaaaaagatactttgggccgggtgcagtggctcatgcctgtaatcccagcactttgggaggtcaaggcaggaggatcatgaggccgggagatcgagaccatccaggccaccatggtgaaaccccgtctttactaaaaatacaaaaaaaaaaaaattagccgggcgtggtggtggccacctgtagtcccagctacttaggaggctgaggcaggagaatgaagtgaacctgggaggcagagcttgcagtaagccaagatcaggccactgcactccagcctgggcaacacagcgagaccctgtctcagaaaaaaaaaaagaactttggcaaagcaactcacctcctctcaatatgcttgttttataatgcacatgttcatggactagtttacttaaaatagatgataatcaccataacaattgctcccttcaaagaacatcacatgcaagacaccgtcacatccccattcctgaatttatttttattttttatttttagagaaggggtcttgctatgttgcccaggctggtcttgaactcttggcctcaagtgaacgttttgctttggcctcccaaagagctaggattacaagcagactacaggcatgagccaccatgtccagcccatattcctgctttttgggaggaaaagatctcccgataatttttatatttttcagtctcttccagaaaatataacaagaactgcattttcaaagactcttgactcaagttattttaactaaaggaacagttggtgcaaagagaatgttttcaaaatgtttataccttttcagtagccaacattcacatgacgggcccactcaacctgcgaaagcaataagaatattttaaaattccttggctacctttggaaggcacttcttttctgccaaaatattttctggaaaaaaaaatgtattcttgcttttaacaacctcctctccatcctccacttatacacatccccgtcaacatcccaggaatgtgggcactccctgctaataacacaggagatgggctaacacccatccctaacctggagacccacccagggcaagaggattcctatatgctgcagggccatttccagcctagtccaatctcacatacacacacccaagtcttactttgaggattttaggataattccaagtaaataatcttatattcagaatacagaaagtgggtggaaagcatatttcaagacagatttcagtttgattactgtatgcaggacattatatagtttggatatttgttcctgcccaaatcgcatgttgaattgtaatccccagtgcctgagatgaggcctggtgagaggcatttgtgttgtcaggagaatcctttatagtttggtgctgtctttatgacagtgagtgagttcttgtgatatctggtcatttaaaagtatgtggcacctgccccccgcaactccctcttgctcctgctctggccatatgatgtgctcctgctttgccttccaccatgagtagaagctccctgaggcctccccagagaaagatgccagcagtatgcttcctatacagcctgcagaaccatgagccatgaaacctcttttcttataaattacccagtctcaggtatttctttatagcaatgcaagaatggcctaatacagaatggaaacacacaaaaatgttaacagtggtggtgatctctgggtgatgaattttggatggctgttttgtctaatctacattttcttttgttctgtagtgaagatatattaatgttatgatttataaaaataatagtaagaacaaaggaggcattttccgtgagcatattatcacacacagagtgaaatatcaaatagtagagaaaggcttctgatgagaaacaagaatcccttttaattcgtatatctgtttctggtgcttgagatcacatcagagcctgctacctagcagctcaactgtgttccagttggcccacgcagtctatttgcagatgatttaattaattgccaatatttaaaatagcaggtacttttacgtaaaaatcttattttaggtcagtctaaaaataatcaaaagattctcatatgtcattaattgaccctagagtcaagtaatggcttcccattcacacagttttgctcattttgtcataatccccaccaacttctatttttttcaacactagactcatctgacaagtttccattatcttcccactttctgatcacttgaatttctgacttctgtccatgtgttatgctgatatctattttttgatgtatcttattgaggcagttgaccttctgctagctagctaaggctataagttgtccatttccatgtcttcccaatatagttacagtaaccagttttattaggttagcacagaagttattgtggtttttgccattactttaatggccggcacagtgcctcatgcctgtaatctcagcactttgggaggctgaggtggttgcatcacctgaggttagaagttcgagaccagcctgaccaacaatggtgaaacccaatttctactaaaaatacaaaattaacccggcgtggtggtacatgcctgtaatctcagctacttgggaggctgaggcaagagaatcacttgaacccaggatgcagaggttgcagtgagccaagattgcgccattgcactccagcatgggcagcaagagggaaaccccgtctcaaaaaaaaaaaaaaaaaaaaagagtaatgacacaaactgcagttacagccaggcatggtggctcacacctgtaatcccaacattttgggaggctgagacaggtgtatcacctgagctcaggagtttgagaccacctcggcccacatggtgaaaccctatctctactaaaaatacaaaattagctgggcatgctggtgggcacctgtaatcccagctactccggaggctgaggcagaagaattgcttgaacctggaaggcagaggttgcagtgagctgagatcgtgccattgcactccagcctgggcaacagagcgagactccgtctcaaaaaaaaaaaaaaaaaaaaatgcagttacttttgtgccaatctaacagttaatgtaacctttatttcctgttctattacatagaggcagctcccttggagctctcagctttcaagatgtgttagtctattcttgcattactgtaaagaaatacctgaggctgggtaatttgtaaagaaaaggagtttaatcggctcacagttctgcaggttttacaagcagcatggttctggcttctggcgaggcctcaggaagcttacaatcatggccaaaggcaatggggagccagaatgtcatttggcaagagcgggagcaagagagagaagagggaggtcccacactcttttaaacaaccagatctcccctgaactaactgatcaagaactcatttaccagcaagggaatgatgcgaaaccattcatgaaagacccgcccccatgatccaatcacctcccaccaggccccacttccaacactgggaatcgcatttcaacctgagatttggaggagacagacatccaaaccatagcacaagatgacactcttacccctgccttcagctcccttccttctacttcccaacttttgttattactgcttatcattacttttgctttgtaatcaccaaaactgagaatacattctcttctgtaaccaaaactaagtgacccatgctctgtccatagactgatctgcaaagttaaaaaagcaataattccatttctattctgtgaacgtgtctatattgttcataacagatctagaattacattctcttgttttacacagtctcttcacccccactccccagagtttctactttcctttattgtctctttctcttgcattagttccttttgcatggcatccattatttctaaactttccatttacaattaagtattctttgtttgtccttctttgctgccacaacctttctctctcttattctgctttggctcattctcagagaacgttctcagaaatgttaaggaagaggtaaattttctgcattgttattgtctagaaatgtcttcgttttattcgtaaactgaactaacagttttgcaaagtattgaattctgagttgctaattttttgtgcacagaacactgaatttgttgttgttgctttgtgttttgttttttgttgtttgttgttttttttttgagacagtttcactcttcttgcccaggctggagtgcaatggcacaatctctgctcactgcaacctctgcctcccgggttcaagcgattctcctgcctcagtcttccgagtagctgggattacaggcatgtgccaccatgcccggctaattttgtattttcagtagagatgaggtttttccatgttagtcaggctggtctcgaactcccgacctcaggtgatctgcccgcctcggcctctcaaagtgctgggattacaggggtgagccactgcgccctgccagaacactgaatgttttatgcttttgtctggtgagaagtctcgtggacagtcaatgtcttgttcctttgtgtatgcacagtttcccctctttccttgaagtcttctaatcttttccttttggttcttgatgtctgaaactttacattgatgtgcttagctgtcattcttttttttttttttatactttaagttttagggtacatgtgcacaatgtgcaggttagttacatatgtatacatgtgccatgctggtgcgctgcacccactaactcgtcatctagcattaggtatatcttccaatgctatccctcctccctcccccaaccccacaacagtccccagagtgtgatgttccccttcctgtgtccatgtgttctcattgttcaattcccacctatgagtgagaatatgcggtgtttggtttttttcttgcgatagtttactgagaatgatgatttccaatttcatccatgtccctacaaaggacatgaactcatcattttttatggctgcatagtattccatggtgtatatgtgccacattttcttaatccagtctatcattgttggacatttgggttggttccaagtctttgctattgtgaatagtgccgcaataaaaatacgtgtgcatatgtctttatagcagcatgatttatagtcctttgggtatatacccagtaatgggatggctgggtcaaatggtatttctagttctagatccctgaggaatcgccacactgacttccacaatggttgaactagtttacagtcccaccaacagtgtaaaagtgttcctatttctccacatcttctccagcacctgttgtttcctgactttttaatgattgccattctaactggtgtgagatgatatctcattgtggttttgattttcatttctctgatggccagtgatggtgagcattttttcatgtgttttttggctgcataaatgtcttcttttgagaagtgtctgttcatgtcctttgcccactttttgatggggttgtttttttcttgtaaatttgtttgagttcattgtagattctggatattagccctttgtcagatgagtaggttgcaaaaattttctcccattttgtggtttgcctgttcactctgatggtagtttcttttgctgtgcagaagctctttagtttaattacatcccatttgtcaattttggcttttgttgccattgcttttggtgttttagacgtgaagtccttgcccatgcctgtcctgaatggtaatgcctaggttttcttctagggtttatatggttttaggtctaacgtttaagtctttaatccatcttgaattgatttttgtataaggtgtaaggaagggatccagtttcagctttctacatatggctagccagttttcccagcaccatttattaaatagggaatcctttccccattgcttgtttttctcaggtttgtcaaagatcagatagttgtagatatgcggcgttatttctgagggctctgttctgttccattgatctatatctctgttttggtaccagtaccatgctgttttggttactgtagccttgtagtatagtttgaagtcaggtagcatgatgcctccggctttgttcttttggcttaggattgacttggcgatgcgggctcttttttggttccatatgaactttaaagtagttttttccaattctgtgaagaaagtcattggtagcttgatggggatggcattgaatctataaattaccttgggcagtgtggccattttcacgatattaattcttcctacccatgagcatggaatattcttccatttgtttgtatcctctttaatttcattgagcagtggtttgtagttctccctgaagaggtccttcacatcccttgtaagttggattcctaggtattttattctctttgaagcaattgtgaatgggggttcactcatgatttggctctctgtttgtctgttattggtgtataagaatgcttgtgatttttgtacattgattttgtatcctgagactttgctgaagttgcttatcagcttaaggagattttgggctgagacaatggggttttctagatatacaatcatgtcgtctgcaaacagggacaatttgacttcctcttttcctaattgaataccctttatttccttctcctgcctaactgccctggacagaacttccaacactatgttgaataggagtggtgagagagggcgttcctgtcttgtgccagttttcaaagggaatgcttccagtttttgcccattcagtatgatattggctgtggatttgtcatagatagctgttattattttgagatacgtcccatcaatacctaatttattgagagtttttagcatgaagcgttgttgaattttgtcaaaggccttttctgcatctattaagataatcatgtggtttttgtctttggttctgtttatatgctggattacatttattgatttgtgtatattgaaccagccttgcatcccagggatgaagcccacttgatcacagtggataagctttttgatgtgctgctggattcggtttgccagtattttattgaggatttttgcatccatgttcatcaaggatattggtctaaaattctcttttttggttgtgtctctgcccgactttggtatcaggatgatgctggcctcataaaatgagttagggaggattccctctttttctattgattggaatagtttctgaaggaatggtgccagctcctccttgtacctctggtagaattcggctgtgaatccatctggtcctggactctttttggttggtaagctattgattattgccacaatttcagctcctgttattggtctattcagagattcaacttcttcctggtttagtcttgggagagtgtatgtgtcgaggaatttatccatttcttctagattttctagtttatttgcatagaggtgtttgtagtattctctgatggtagtttgtatttctgtgggatcggtggtgatatcccctttatcattttttattgcgtctatttgattcttctctccttttttctttattagtcttgctagcggtctatcaattttgtggatcctttcaaaaaaccagctcctggattcattaattttttgaagggttttttgtgtctctatttccttcagttctgctctgattttagttatttcttgccttctgctagcttttaaatgtgtttgctcttgcttttctagttcttttaattgtgatgttagggtgtcaattttggatctttcctgctttctcttgtgggcatttagtgctataaatttccctctacacactgctttgaatgtgtcccagagattctggtatgttgtgtctttattctcattggtttcaaagaacatctttatttctgccttcatttcgttatgtacccagtagtcattcaggagcaggttgttcagtttccatatagttgagcggttttgagtgagtttcttaatcctgagttctagtttgactgcactatggtctgagagatagtttgttataatttctgttcttttacatttgctgaggagagctttacttccaactatgtggtcaattttggaataggtgtggtgtggtgctgaaaaaaatgtatattctgttgatttggggtggagagttctgtagatgtctattaggtccacttggtgcagagctgagttcaattcctgggtatccttgttgactttctgtctcgctgatctgtctaatgttgacagtggggtgttaaagtctctcattattaatgtgtgggagtctaagtctctttgtaggtcactcaggacttgctttatgaatctgggtgctcctgttttgggtgcatatatatttaggatagttagctcttcttgttgaatttatccctttaccattatgtaatggccttctttgtctcttttgatctttgttggtttaaagtctgttttatcagagactaggattacaacccctgcctttttttgttttccatttgcttggtggatcttcctccatccttttattttgagcctatgtgtgtctctgcatgtgagatgggtttcctgaatacaacacactgataggtcttgactctttatccaatttgccagtctgtgtcttttaattggagcatttagtccatttacatttaaagttaatattgttatgtgtgaatttgaacctgtcattatgatgttagctggttattttgctcgttagttgatgcagtttcttcctagtctcaatggtctttatattttggcatgattttgcagcagctggtaccggttgttcctttccatgtttagtgcttccttcaggagctcttttagggcaggcctggtggtgacaaaatctcagctttgcttatctgtaaagtattttatttctccttcacttatgaagcttagtttggctggatatgaaattctgggttgaaaattcttttctttaagaatgttgaatattggcccccactctcttctggcttgtagagtttctgccgagagatccgctgttagtctgatgggcttccctttgtgggtaacccgacctttctctctggctgcccttaacattttttccttcatttcaactttcgtgaatctgacaattatgtgtcttggagctgctcttctcgaggcgtatctttgtggcgttctctgtatttcctgaatctgaatgttggcctgccttgctagattggggaagttctcctggataatatcctgcagagtgttttccaacttggttccattctccccgtcactttcaggtacaccaatcagacgtagatttggtcttttcacatagtcccatatttcttggaggctgtgttcgtttctttttattcttttttctctaaacttccgttctcacttcatttcattcatttcatcttccatcactgataccctttcttccagttgatcacattggctcctgaggcttctgcattcttcatgtagttctcgtgccttggctttcagctccatcagctcctttaagcacttctctgtattggttattctagttatacattcgtctaaatttgtttcaaagtttttaacttctttgcctttggtttgaatttcctcctgtagctcgtagtttgatcgtctgaagccttcttctctcaactcgtcaaagtcattctccgtccagctttgttctattgctggtgaggaactgtgatcctttggaggaggagaggtgctctgctttttagagtttccagtttttctgctctgttttttccccatctttgtggttttgtctacttttggtctttgatgatggtgatgtacagatgggtttttggtgtggatgtcctttctgtttgttagttttccttctaacagacaggaccctcagctgcaggtctgttggagtttgctggaggtccactccagaccctgtttgcctgggtatcagcagcggtgtctgcagaacagtggtttttcttgaaccgcgaatgctgctgtctgattgttcctctggaagttttttctcagaggagtacccggccgtgtgaggtgtcagtctgcccctactggggggtgcctcccagttaggctgctcaggggtcaggggtcagggacccacttgaggaggcagtctgcccgttctcagatctccagctgcatgctgggagaaccactgctctcttcaaagctgtcagacagagacatttaagtctgcagaggttactgctgtctttttgtttgtctgtgccctgcccccagaggtggagcctacagaggcaggcaggcctccttgagctgtggtgggctccacccagttggagctttccagctgctttgtttacctaagcaagcctgggcaatggcgggcgcccctcccccagcctcgctgccgccttgcagtttgatctcagactgctgtgctagcaatcagcgagattctgtgggcataggaccctccgagccaggtgcaggatataatctcctggtgcactgttttttaaggccatcggaaaagggcagtattcgggtgggagtgacccgattttccaggtgccatctgtcacccgtttctttgactaggaaagggaactccctgaccccttgtgcttcccgagcgaggcaatgcctcgccctgcttcagctcgcgcatggtgcgctgcacccactgacctgtgcccactctctggcacttcctagtgagatgaacctggtacctcagatggaaatgcagaaatcacccgtcttctgcgtcgctaacgctgggagctggagaccagagctgttcctattcagccatcttggctcctctccattctttttttatatggtgtttggcatgtaaagattcattttcttcagctctagaaaattattttgtattatttctttggtaaattcccttctgtttactgtttactcttattttctggaaagcatatctgtcagatgttgaacctcctagatcagtcctctgttttcttccatctttttgttactgtttgttttcttatgcttttcaggaaatttcctcaaattctccttttaacctttcccttgattttgttatattttatattaacaacaatagtgatttccacaagagtttttttttgttattctctcttccttttaataacatcctgttcttgttttgtggatgaatcatcttgaatctgtctgagaaactgtgaaagttttaactttgttgttgcagttgctgtttttgttgttaccaaaattctgcctcttcttcctaggtcatttttttcatcttgtttaacttaatctaagcctgcattaaatctcttcttgtcctttcatgtttacaagagtagcgatcaaaagctaattctaggtctgcaggcaagggcagagctggttgactggtagaatttgttttcaaaatctgatgagttatgccaagatgtggcacctttattctctgcctctattgactttcttacatggtgacataggtgactggtggcattgcatactgtgcatgtggatggagatatgaggtcaagaatcaataggcttccaattaatcttcatattttcatcttccccttcaatcacacctgacatttctgagatctccagtttgtatagggctctgtgtgctgatcagtttcccctttggtgaacaacagctaactctaagttgtcacgtcctctgccctgctccagcggtctccacttcttcaacagtgtggtcctccataaatctgttggactccctcaccctccaaatggccctcaccaatttgcttggtgtaatgggcttatgactattttaattgcttcataatcattttagagaagtcttgggaagtgtaggaggtaaatgagcatggccagtctgccatccttaattggatggcccaccacctgctttttaaactgcttggatgtttaagcttggccctacattgatttctcttgtgccttagtaatgaccaacaaagcagcctgaaccccagttattgcacagacctgagatgtatttggaggtatctgctgtgtgtccatgtatctttgtgtgtaaaaatatgtactcagaggacaacaaaagctacgtacttcaattttaaattcttaatacatttttaaatattgaaattatgtcttttttatgttcctatacattgtgttaatgggagagactagatgaggttaagtaaaagttaccttgtactctaggaccttagagccagtggaggacttagattccggacagcccagccccagactagctgcagcagatactggcagttgtcctccctggcccacgtgggttgctgttgacctttttcatgctaaccccagttttgatgtgttcttgcttctaatagcagcacctgcaccattttgtcaggctactggaacccatttttctccaactcaagcagaggcagaatgtatgcacccttccccccatccacatccctgacacctcgtagcgttcaacacctcgatgactgcggtggtggggtatgaagctcagctctctcatcttggagtaggacatttctggatgtccactccaccctcccactgcaggaccaagatgaagtccttgctaggacccgcctgagatcttccccgaatgtgctttcatttcgttctctgccctgctttccctggtcccataggaatgcccccgcagagtgcttccttcagaaccacctccatgtgaaccctcatctaatgagcactggtagttacatgggccgaaatgactgatggtccttgtattccttcctaaacagcaccttaatgaaaacctggcaaagctcacagccaggtttgagaaagcaacagcagacaaactcaaatgtcagcaagaagccgaagtgaccgcagtcaccatctcccttgccaaccgcctggtgagtgtaagccacagcagcccgagctgtaattatattagcaggcttgtcaaatgccgtggaggtgcaagatagatgagcacagcacagcagcgctttgacttggagggaagtattaaaatgtgctgaaatgcaggaattgagtcctgaggaaaatgtggatgcataaaccctaatctggtcaaaggagttttcttatagacatggttgggaggatgggagcactggatctatcaggcagctcatgcaaaatggtaacacacttatattcatgtgtattgaccagaggaaacattacaagacaaagccagcattttataggcaaaccatgacattcctatctatgtaacatttcattataagggtgtggccaagattaggaactgagatagaaacagaaaagaatgagacctactgaccctgagtatttcagaaaacacacacagacacacatatacacacatgctccggccttcctgggaaatcaagtctgcaggtcagggcagcggtgcttgtgttatgggtgtttgtttctgcataaaaaaattactccaaagcttagtgattttgtacaataaccatttcataatatctcacaagtttgttgagggcagggctcagctggccaggttttctgctccatgtggccatgactggggtcacttggtacattcagctggtggccgggctggaggcccccgagatgacttccttcacatgctgggcatcttggcagtgatgattggaagggagggtgcagctggtcctctctcccttcctcagggcatttccacgcattccctctagcagggtagtcggacgtcttacacagtaactcaggacatcaaggacaagtgtcccaagaggcaggaagtggaaagtcccagtatctgaaggcctgggactgaaaactggcacaacagcacttccgctgtactctataggtcaaagcagtcacagattaaagggcagagagcacagacagcaactcttaatgacaggaatgtcaaagaatttacagccttttaaatctcctatggcttgtatttctcatcccatatatcagctaagactctgcaaagcaagtcaaatggatatgatttctcttcaagctagagactttacagcaccctcctcaccagtgaagggaagtacattccacacctgttgacatttattccagccaccactgaattacacagcagagccagatgttttaatctggggaacagtgagtcatagcgatcactgaatggagctgtgatgtaatgaagacctgccatacccaaatgtgtgtctgtgcagttgtcactggaccagcttctgtgtggctttgagatgatccgtttagctgaacagttcagtttagagatagcaactcttgccaatgtgcaagaagtcctccagatctcctagctggcctgccttccattcacctccctgcttggtttctgaacttagcgcagccttctctgcctggctggagcactttctgagtcagtgctcatgggaggcagtgtagcactctgctctaggagtcaggatgttcaggctctgaagccacccctgtctctaccgacctagagattctggtgagatatttggactttctgacctttgtgtaatctgaaaacaggcatgtgaatgactgggttggcaaatctctaaggtctgtccagactgtgacgttccatgatgttatcattagaagaaaaaataaagggtgagtcctaacgcagaagcaaagctccgccataccactaacagtcctctgtagaaagaatggctctcctcccagggagactgtaccaacccaaagagggctggggggtcaggactttgtacacacccatgaccttaccatgcttctctgtgtctcaattagcacatctgtctcctcgcccgctgtgaattatttatggtgcatggacttgattttgtttattttcatttccccagcatttggaaaggagaaagaagtggctaattttctaacatgttccacagaccaggtattgtgctaaataataaacatacatgattatatttcatcctctcaacaaccctttgattaagtggtatcagtctccacacacagaaagagcagagtcaaaccctgtcatctttccatggttcatgtgatgcatgacacagaatgggggcttgtgtactgaaagctttgctacaggcagcacaaatccccattaacggaaagggccatataagtgatattctgcctcttcccgctatgaagcgtgcagcgggcgctctccatgatggaatcacggctctatcacctactgtgtaacacgcctcctctcctctctggcttttgaaatggtaggttggaggactcgcttctgaaaacgtgaggtgggcagatgccgtgcagaacttcaaacagcaggaaaggacgttatgtggagacattttacttataacggctttcatttcctaccttggcttcttcacaaagaaataccggcagagcctcctggacagaacttggaggccctacctgagccagctgaaagtacgtatggcctgaatttctcccgaccacatcagcctctgggcaccaatgggaagacatcacggtcataattcgcatcctctggtgtcctcctgcacactcatccccaccaccccctgagcaccaggtgtgaaacctgcgtacccgtgtccttccacactgccttgcattgctgcccactgccctccaggccacctgggggcagcacctctcctctgaatgtagtcctccatgggaacactagtcctcttccccgcgggctgtctcctagcaatccttaaagctgtgaaacctgagagatagaaaaagaaccattttcgtctctgatctccccactccagagccagacttcataggagcagtcaggggacgttccatttcccagatcctacattgcaccttgttactgggccctaaagctacacagcttgtgccagtgactcacagatatccttcgtcggcttccgtcctgcataatcccatgaacagctgctcacatgcttcttatttgggcagttcagcttgtcctcctcgtgtggctaggtggatgttactcccaacccatccctttacatcacccgccccccaccccctgcaatgtaactaaatggagaaatactggtttcccattaaaggggattcaaagctatacttggacgcgagcatcagaagttctaatattttcttggcactttcgcatcacttctagcaacccacaaatacttcctgtgtatttagtgtgtcctaccactccactatacaggaggcacacaaaacgttcaagaccgggatacctttggcaagttcccagtccacttgaggagattaggctcatagaagtcagcgaaggtgggccgggcgcggtggctcacgcctgtaatcccagcactttgggaggttgaggcgggcggatcacgaggtcaggagatcgagaccatcttggctaacacagtgaaaccacgtctctactaaaaatacaaaaaattagccgggcatggtggcgggcgcctgtaatcccagctactcgggaggctgaggcaggagaatggcgtgaacccgggaggcgaagcttgcagtgagccaagatagcaccactgcactccagcctgggcgacagagcgagactccgtctcaaaaaacaaacaaacaaaaacagtcagtgagggtgaaagtcagccccaaatttcacaacataaggtaaaagctgtattccagatctatttgtaagtagaaccttagaacaaaaactctttctgtagtgatgattgttttctcagatcagctcataaaaccctgctcacctgacaattagctgaaccgtagtttttaaaatgctagcaaataaacaaaaaataaagcagctgtttgactcatcctaaacacttttggaaaaaggaaattgttgaaggaaccatcattaactgagtgaatgaagaagaagagctcagtagcagcttagtgaggatttttctggctttgtttggattcttaagcttttttgtgtcatggacgtctttggcagtctggtgagacctacggattctttctcagaataatgattttgacacgtcaaatagaatgcatgagattacaaagggaaaaaatatattggaacacaattctggtcccagataagaatccccaaggggctgatttcccttcagaggtttgctggatactgtagtactggccatttgtgcccttgttagatacaattaagaggatgggagatggtttggagaggtttccctgggataattgggcagaacaaacttcagagaggagtgagatgaaggagttaaaagggtatttgtctaaacctcgaaagcattatgctaagtgaaagtaaccagacacaaaaggtcacatattgtaggattcatttatagtaaaatatccagaataagaaaatccaaggggacagaaaacatattcatagtttccacgagctgggggtagacagaaattgcgggggctgttgaatgagtatgggatttgggggtgatgaaatgttttgggggtagagccgatggctgcataatgttatgcatagactaaatgccactgaattgtgcactttaaaatgattaatttatttcatatcaatgttaccttaatttaaaaaaatatatatgggtcatcaatgaaaaagattgcctgtaaaaaaaattaagtgagcccggcgtggtgggtcacgcctgtaatcccagtattttgggaggccgaagcaggtggatcgcctgaggtcaggagttcgagaccagcctgtccaacatggtgaaacctcgtctctactaaaaacacaaaaattagctgggtgtggtggcaggcacctgtaatcccagccacctgggaggctgaggcaggagaatcacttgaacccgggaggtggagtttgcatggagctgagatgacgccattgcactccagcctgtgtgacagagcaagattccatctcaaaaaaaaaaaaaaagaactgagtgagcagagaaaggctaacaaagaagaaaaggcagtgtctagggcacacacaggagccctgaaggggcctaagagaggccacaggcaagttctcagactgataaatactcggcagcttccccacaggcaccagcaggcaggtttgcaagagtcctgcaagtgaatggggtgtttggggaagagaaaaagaaaacccgtccagcctcttgcaagctggtgaaacagaggagaggaaagagtggtttgtgccggttggtacagacaggagcaaacccactaggcatgggacctggtgctggttcatggagcgtgcacaagaaacacagacatatagcagagaaataacactgttaacatgggtgagagtgtgtaggaggtcgtagattaaaatacagataatatagtagaaacttgacttaggtaaagataccgaaaaacaaagaatcagtcacacgagttgaatttctgcagttattcatccatggaggggaaaaaaaaaagctatcaggactttaatagaacctgcttccagaaataatcacacagccagaaaggcattcttcagtgggatgttgatcttgcttttaaaggagttgtgtcatttggtgagtaactgcattcatcccagctgagaatgtctgcttctgttctgagcgtggggtggtgtttcttcttcaccagactcccattccagtcaccccagccctggatcccctgaggatgctgatggatgatgctgacgtggctgcctggcagaacgagggcctcccagccgaccgcatgtccgtggagaatgccaccattctcatcaactgtgagcgctggccactcatggttgaccctcagctacaaggcatcaaatggatcaagaataaatatggtgaagatctccgggtcacgcagattggtcagaaagggtaagtggttgagcacagaagttcccactttagccatttgtgcaggaaaatgtatagatcatgagcagattttaagcccagtgaatggtttgtacactcctggtctctccatcaggcttctcacgtttctccgtccattttagcaaacatctcaatgaaagatgcctgggtactaagtctttgctttttatccacatgagaaattatgtaccacaacctctcgacccattctggggtcctttcttcaccatcccttgagctcatcctctcattgtcccttaaacatttcctccccaaacttcatatcccattgtcacatagctctgtgctttataaagttttcctcacccttagctaaagctgcctcccttatctctcctctacccattatttctacctctgccctagagccacatacaaagaacaaaactctcctcctgaggcacagttgaacatttcagtaggtcccatgaagcagctgagttagttatgaaaccttcagagcccttggtacctgccatatggcttcgtacttacctgtgggaaagttaccacgtgaagggacttgaatggcactgagaatgtctggccagcacccaccaggcttcagtggcttgggccttgacatccctcatgcctcccttcattttagccttgtggtttcagtactcatcctgttctatgtcatcaggacacctggggaaacaggatggggcaatggggaagaggaagtgaggcagacatcattcattaggaggttgatatgcatcagtcttggtgttagaggttttatctcaaatgccgtccttaatccacacagttaataaggttagtaatcaactggttaataaccagtaaggttattggttccatttcacgtccgaggaagcagaggttcacagaagttaagtaatttccctggggagttcgccattttaaaagtgatggaaatttggcactcgtgtttatagcagcattattcataatagacaaaaggtgaagagaacccagataaatggataaacaaaatgtgatgtacacatgcaatggaatattattgccttaaaaggaaaacagttcttaaaagagcataattagattgtgatacaaaggagaaatgcttaaggacatggataccccattttccataacgtgattattatgcatagcatccctgtatcaaaatagcttatgtaccccataaatatatacacccatgtacccataaaaattaaaagtaaaaaatgttttcaaagaaaacaatttaaataaaataaaattgaagttaaaaaaaagggaaaaaattctgacacatgccacaacatggatgaatctttaaagtgttatgcagagtaaaataagctggtgacaaaaagacaaatgtggtatgattcctctcatccaaggttcccagggtagccaaattcattgagacagaaagtcgaatggtgtttgccagggagtgcgagggagaggggaatgaagagttaagtgtttcacaggtacagagtttcaggttttgttttttttgtttgtttgtttgtttgttttttgagacggagtctcactctgtcacccaggctggagtgcagtggtgcgatctcagctcactgcaacttccacctcccgggttcaagcaagcgattctcctggttcagcctcctgagtagctgggactacaggcgcccaccaccacacccggctaacttttttttgtatttttagtagagaccgggtttcactatgttggccaggctggtctcgcactcctgaccttgtgatctgcctgcctcagcctcccaaagtgctgggagtgagccactgcacccggccagttttggtttttcaagaacagttctgtgaatggatgatggtgatggatgcacaacagtgtacttaaagccatggaactgtacacattaagacggcacacaatatatgttacatatattttaccacaatttaaatatattaattaataaatatgtttaaaaagtaatggaggcagctgggcgcagtggctcgagcctgtaatcatagcactttgggaggccgaggcgagcagatcatttgaggtcaggagttcaagatcagcctggccaacatggtgaaatcccatctctactaaaaatacaaaaattagctgggcgtggtagcagacgcctgtaatcccagctactcaggaagctgaggcaggagaatctcttgaacccaggaggtggaggttgcagtgagccgagatcgtgccattgtactccagcctgggggacaagaacgaaaactctgtctaaaaaaaaaaaaaaaaaaaaaaaaaaaaaagtaatggtggcagtatttgaagctgggtcatcctcacttagaaacctaagatttatccactccagcaaacagccactcaaagtgagctttgttgctctggccacgtgtcccaagcatgcacgcactaaggtccagatcactcggggttgttcaaattgaacacatgatgttaaaaataatagttaaccaagtcaaacattaaatattataaatgcatccatcttatagagcaaactttgttgagaagtgaatgccaaggcatgctatgatatatatagatagatatagtggcgctatctcggctcactgcaacctccacctcctgggttgaagctattctcctgcctcagccttccgagtagctgggatcacaggcgtgtgccactatgcctggctaatattttgtattttttgtagagacagggtttcaccatattgcccagtggtcttgaactcctgacctcaggtaatccacctgcctcagccttccaaagtgctgggattacagacatgaaccaccgcgcccggccaatatgatatatttttatttgcatctttagtcacatagtaatccaaccctggccttctcccgaaactttaattaaaatattcttttccagctgactaacaatgcattttagacaggtgtatgttctttttgctcattgcagtgtccctagtgtctaaaacactgccgaatgcattgtaggcccttaataaatatgttcaattaattcttagttcatgtccattaactactttcctgttgaatggttttctagatttgttgtatattatttgaatacaaatgttgcattatatgtaatatgtatagtcttctttcttcatatgaatgaaaatttgttcgtctcatttgtcttttaatttacttttgtgaggttttacctactacagttcattttattttagttttttatttgatcagatttgtcagccatttattctataagtgatgcctagaggagtcttttctctccaagaatttttaaaatattcacctacatttttagtttttagtttttttgtttgtttgtttgtttgtttgttttaagacagggtcttactctgtcacccaggctggagtacagtggtgaaatcatggctccctgcagcctcgacctccggggttcaagcagtccttccaccttagcctcccaggtagctggaactacagatgtgcaacaccatgccctgctaatttttggatttttgtagagagggtgtctcaccatattgcccaggctggtctcaaactcctggtctcaatctcctggcctcaagcaatcatcccaccttggcctcccaaagttctgggttacaggcatgagccaccaggcctggcccatttttaagttttttgagttttctttttacatggaaatccaatcaatttaaatatagtttaagctattatatgtggtacagactaattttccaagtggttagctattgtttcaataccaaatattaaattttccattctttcctcaattaattagacatgtcattttactatatattaaattattttattaaatagggtcattattcttttctatgtatctaatactacaccagctcttatttacttttatatttagtaacatttattgtggtgtttcccattacaaaagtaatgtatcatcactgtaaagaaaaatgagagggcggggtaggagttatcataaaaaacaaagaaataaaaacttctataattcatctttcaaaaacactgctaacttattggtatatgctgtcctttaagccttctttctacacatctatattgttgatatatataaaatatgtagtattagataatgactccctcctcttcttctttattggttttctccttgccagcctcactgtattcttttaggttaactttaagatctttggttgagttccataaagttttactgttattctttgtttgagttgtattatatcagtcttataaattattgttattctttgtttgagttgtattatatcagttttataaattgactttaagaaaatcaagctatttacatatttattaaactctacataacactgaaaagttaaaagtaacctaaatctttgttaattgattgataaattaaggtgtatcaatatggcctaatacccagtcatttaaaattacatggaaggatgtttaatgacatggtgaagtgattacaatatattttctgtaaaaaaaaacaggttataaaacaaaacaccatatgaatctaatactctcaaagctaaacttgacaatataatatattcaaatatacgtagtatacaccaaaacgttgaagacacattatggttttcattatcttttttgtattttataatttctccctatttctaaaagtgtatagaatcacataaatatcactttacatagggaagaaatgtggccactgaaaacattccaaatagctgtgcctccaactataccaccatgtcttagaggtcacgcttgtctcattaaatggtctcaactccatagcttgccacagtctcatactcccggactcatacttgtttccctagctaccttcaaatcatagagcaggccctggaagctggagctgtggtgctgattgaaaatctagaggagtccattgatcctgttctgggacccctgcttgggagagaagtcattaaaaaaggacggtaagactcagctgtgttgctgacccttcggggggagctggttcatggccctggttagaatcatgaagaggtctgctcttcctagaatttcctctcttcagttcatgtcaagtagctccctgcagcacatccacctttctttcttccagcagaggtctatttagtggcctttgtttcctagagaaagtttcctggagaaactttgcttccatcagccagtgtcccaactgacttccttctaaatggccacagtgcacaattttggaaaaacttgagaaggaaatcggtcaaaaagcagactgacttttaagtacgagcatcttatacaagccagtcatctgaattctgacaactcggttccttgtcaatttaatgagtctctgctgctttgagtgctggctcatgatgagggcttagcaagcacaaggcaaagcagggggtggtgtggagaggaaaagagaggaaggagacgggcaatgggttcgtatgaagggcagagtaattatcatgaaggggtgcttgactcaggagcctcacccactgctggggccatcgttgcctttactgtcctcaagtcgtgctcgtttacttggttaatcattttcacccatagatgtcattcccatgtcagccatgaggaaaagtaagccctattgctggcgtataaagcacgtttgtggaaactgcaaggtggttcaccttcctccagacacttcactgccatctgctggaaattgttcataatgtactaatctacattgacacaacaggcatggctcttcctagagttgcacagtacagaaccaaacatggtggccatgggaaaacatctatccccctccacacctgttcccaacattagtgcaaaaaagaatcccagggctcatcctagacataggaggaatccatctgaatatagcaatattgtttgaaaaaaatctcaaattctgaccccaaccaaattttgcaggaaggcaccttaccttcacatgagcctttatgttccagattcattaaaattggagacaaagaatgtgaatacaatcccaagttccggctcatcctccacaccaagctggctaatcctcactaccagcctgagctgcaggctcaggccaccctgatcaacttcaccgtgaccagggatggcctggaggaccagttgctggccgctgtggtcagcatggagaggccagacttggagcagctgaaggtgaggacagaagggagaaaatgttctgccactagagcctgcagtgtactccactctgggagaggttgcagaggggggctgtttttcctggattgagttaggtgggttctgctagactctggaagactgctgaccccatgtagcaacctgggaataccatactggggaaagaaggatgggtgagctgaagaacagaagcaaaaacagtttgaaggccgggcatggtggctcatgcctataatctgagcactttgggaggccaaggtgggcggatcatgaggtcggtagttcgagaccagcctggccaacatggtgaaaccccatctctactaaaaaataaatattaaaattaactgggcatggtggcgctagcctgtagtcctagctactcgggaagctgaggcaggagaatctcttgaacccgggagacggaggttgcagtgagccaagatcgtgccactgcactccagcctggaaatagggcgaggttctgtctcaaaaaaaagaaaaaaaaaacagcttggagactggacactcctatgaccaagagcagagcctggcatgaacatgagtgctgctgatcacacaggtccacgtgccagaactaagcggaatgaaattctacaagggtaacagaactaggtccaacagtgttagggtcatgtcttagcttgggctgccataacaaaataccatagacggggtggcttaaataacacatatttgttctcctataattctggaagttggaagtctgcgatcatgttggtttttggtgaggcctcttttcctgccttggaggcagcggccttctcactgtgacctcacatgacctcttctttgcacataaagaaagccatggctccaccctgatgacctcatttaaccttaattacctccttaaaggccacatctccaatatagtcacatgggggagttaaggcttcaacataggacttttaggacaacacaattcaatccacagcagataacgtgctttttgtcctctctttaaatgtgattagattatacaatatggcggggtcggtaggtggaattccagtgcatgagagattgagttcagggctccctgggactccgcttcctgcaatcattcattcattgaacagatacctagggagcaccacctctgtaacaggcaggatttgaggtatggaggattcagcagtgaacaaagaaaaccatgtcccagccttcatggaatctacactctagtggaggaacacagaaaacagcaacgtaaacaaatgaacaatgccattcagatagtgataagaatttttaagaaaataaaacagggtaatactggaaagccagagggcaaatttaaacagtggtggtcagaaaaagattcggtgaggagttggcatctgagctaattcctaaataattgtaaagcctctgggcatagagcattcccagcacagagaacagcaaatcctggtcttaaggcaggatcaagatatgtggttttaagaaacaagaaaggtcagggtggctgtggttggaacctccaacaggaaggttgttcttcccacgaatccaaaggctgtacaagggcaaagacactacagctgcctgaagttagtgctttaggatatggagcataaagagaggaagagatgagatccacttggataccagcaccccactccagcctcgaggaagcttttacacagtctgccatggttttacacagtttaaaactggaagacagattctgctgatttttttttaagtaagccataggagagttgttcattaaagtaaattggtaatagagagaactctccagagaactaaaactggaccctaaccctctagttacacaaataagctccgtttagtgaacactgataatgcagtgtgttgcccattgtgcattaagcatagcacagaaatcctaaaagttgggactgggattacagaagagtaaagagggtaaactggctcaaggtcatgtgcccagaatattgtacagttgggcaccaatttgactccttgtctcctgctcatggtctgaagctctttgccattctgcctccactttactatctttaaggcaagggactctcgccctattcagacacatccttagagcaggatgccctgggcatctgcacctgactgtctcttgcttgatatttgcagtccgatctcacaaagcagcagaatggattcaaaattaccctgaaaacgttggaagacagtcttctctctcgcctctcctccgcctctgggaacttcctgggagaaacagtgctggtggaaaacctagagatcaccaagcagactgctgccgaagttgagaaaaaggtaaaactcctctggctagtctgggaaggcagcctaggctggggtcctcctacaattttctctcctcttagacaatgagtctgacttttagaaaaatgtcaaagtaacacatggcttttctgtcttagcaaggttcttctagaaagtctacctaggcaggactcctgaagtgactaccccatatatcttgtattatgtagttcccaccttctggaaaatacttttgatgtcttaactccatccacagttgaggaacacttaagcctttgtggggcctggtattctgtgcagggaatggtagctcaaaatggatacctcagatagtgtgtggaattgccctgaagctaaggaatcgcactgctggaaaagccaactggtttgggcatgattgcatcctgacaaaacccaccggaccgcagaatctcacaagtctgatcttaatgagaaaacctcaataacttcctaggaaactcagctctcaaaaactgtatcatcctgggaagtgatgacacagtgccctactgtgtgtagcttcctttattttataatgtttggaaggccctcggtcccccctgtgaggactagaagacggggtgtgatgggaaaggggcccaacccctgctctgttccagcataccaccaaacctccaacaaggccttttgcagtctcagtctcgcgcttgcatcagaagggcattggagatattggccctgagcaggacagagcatatctgtaacagtgtccaggaacaatatacctttgacggaagatgcttattgccagattattgggatttctccaaatatgaaagacttcgttctaggtagagacaaggtaggaaatatgaaaagcaatgatgggtaagacagataaaccaggtcatacccactctggggtgagggacagttgaggttggagtgatgagattgaaaggaggaagagtcagccgaacattgggtcaacagcagggatgtgaccaccaggttccactatcagttacctatggcctccgtatctctggttgggggcatgagagtttgtaaagtaattacggtagagctgccactgccctggataagagagctggggagacagacccaacttacatcaagagagtaggtcagaggatgggatgcagcatactgatctcttctccccacctcttcatctgttttttttttatctttttctttaaaatcaatgaacacttattgagtacctgctgtgtgccgagggttgtatgaagctttctttttccttttgttgttcagtttctttttgtcttctctctctttctcatttattcatctcatgaacacttacttgaaggccactgtattctaagatccatgatgaaagttggagatacagcaagaaatttgctataatcctaggcttttagggcctggccctctaaggaagaaagacaagtaaacaggcagttacaaaacagggctgagggctgaggccaagaaagcacagggatcagtgaacacacaaaggaggaacactcaacccacattgggtgagagggaggaggtgcttcccttgagtgtaactggaacatagagggggtgggagctggaagtggtcactggcaataaggcatgaaaggtggcctgagtttccgttgtatagggctgtgtaaaccatgctgggaaaattgggctacgtcctgatgggcatcaaagatcataaacctctttcacatattttccatctctgtttctttctgagttgcttttgtaacaatttcctgagatttctcttttagtttgctgattttcttttcaactccagtctattatttaaactgaacactttttaaatttaaataactatactcttatttttagaagttgtagctagttcttttccagatatgcctgttctttttcataatgtccatattttatgcttccttttgtgtccactgctctaaaacatactttgttaatggtgagtttgttcagtcattctcagttcatgagatgctaatccttctgggtgtttttagtttagttttgttttgttttggaaaggggccttctgattgttcccttttgtaatactcctgcagtttgtaattgtttattatgagaacatcttcaataaggatcattgccttttcctgtggtgctcccacaaattatcagtaactttcctctattttggagcataagggcagagcatattgaggtttgcttttagaagcatagtctaacagaaatctgtcttcctgatcctgaggtctcctttcttatttttacctgtcataaacaattttctggctgggcgcggtggctcacgcctataatcccagcactttgggaggctgaggcaggtggatcacctgaggtcaggagttcgagactagcctggccaacatggtgaaaccccttctctactaaaaataacaaaaattagtcgggcgtggtggcaggcgcctgtaatcccagctactggggaggctgaggcaggagaatcgcttgaacccaggaggcggaggttgcagtgagccaagatcgtgccattggactccagcctggggacaagagcgagactttgtctcaaacaaacaaacaaacaaacaaacaaaaaagaaattttctgaaaatagaatattccattgaaagatatctttgtgaaattacatatgaactatttcacaaaaattaagaaaaaagaagactatactatgtttctttccctggatttccactgcttggcattctagttcatttttgagtcatacttttttttttttttttttgcatttccatgaaatctttctcattagagatggagtgtggaggctttcatggctcacgcttcccaactggaagagctgacacctcaccctccgaaagcactagaagtttaccatctcctttctcatccaagttctaggaaggaataccatagtagcttttcaactttctacccatcatccccatccctcttcactccatcccctaagcagacgcatgtctactcacacagaggggccaagttgattctcaggaagcccaggttggttggaacagtgggctgctgtttatttttccaacaggtccaggaggccaaggtgactgaagtgaaaatcaacgaggcccgagagcactaccggccagcagctgccagggcctcactgctctacttcatcatgaacgacctcagcaagatccatccaatgtaccagttttctctcaaggtgacttacacctggagtttcttgcctgattataataaagcagtgtaatattgccaatgcagctctctgtgagagcttatccatgtaagatcattagctatggcaagtctgtaagatcaaagccaggagaggagctatgttaccttcagacatctcttaccatcctcatctctttaattgggtcttacatgactcacgggtaattttgactggaacagaacaggacaccacagcaagtcttggctcattcagtaggcacacatgatacagtaggtactatgcttactgaatgtgtggaaggtgataccgaagaagtctgagaagtgatccctgtccccaaagagcttaaaatataatagacaatcaaatgtgtcacttgtattgattaaagtccaaagcaggcaataataatacaccaactttaaattagttttcttatgaccctaatatccccaaagctgctgcttatgattgttgaaatattcctaaaaccaccaaagatgttagcaaattgtaagtgctgactaaacttatcttactcatgaaaaaataaagacctataaatttttagtgcatctctgaaagtacatctttcccccctagggcattcaccaaaagaccacaattgaagaggcattaggaggtagtgaagcatttctaaatttctttggtttgacccaacaaagaggacatgcatacatatacacacagagaaacaggagagagagaccatatgtatatagacacatggagatttcacatacacacagtcacacacacacacacacacacacacacacagagtgcacacacttcagaatctgtggagtgctttcagctaaaccaccatgtgaagaccaagatggcagggatggtgatgagcagatgagaaatcagaaggcctccagttcctggggctcatttgattgaagatggcatttaatcatttcccaatcttattattttaactcagagtctctgcagattggatgaactgtgtttataatattttatggttttttgttttttttttttgagagggagtctcgctttgttgcccaggctggagtgcagaggcgcgatctcggcttactgcaagctctgcctcccgggttgaggccattctcctgcctcagcctcccgagtagctgggactacaggtgcccaccaccgcacctggctaattttttttgtatttttagtagagacggggtttcactgtgttagccaggatggtctcgatctccggacttcgtgatccgcccgcctcggcctccaaagtgctgggattacaggcgtgagccactgcacccggtcccatattttacgtttttaaaagaaacccaatacttggcctcatatttagtttaaggcaacataggaaagaattataaaaatcttttaaaacagcataaaaattggcatgataagcctaataaccacaggatcacccccctggttccaagagtagttgaaattgactataggtacccatcagaagcctaccacagtgactctgaaaacaagaaattaaatgaggcccatgacaatctgtgttcaaaaccatgttgtaagatgtttggcagcaacagtgtcctgatataggaggttctgaagctccatttttaaagtaggggagatggagtttgggtcaccatactgatattaagaattgcaaaaacagctgttcattgaccaacctgatctttaaaagcaggttaactgctttatgataagtagctgaagtaagggtgttcaaaaatatcgaaaccacaatgcatttagaagccttctctgttttgaagaaaaatgggccactgtaatttccatggtcttggcttttgtctggggttggatttaacagttccccatcctggcagagaaagaagaggcattctcagaatatggaaaccccagataggccaacgtggcaggaaccattcatcctagctttcaaaagtgttttgagcaggaatatattaaaatgtgtttgtgtgtgtgtttacacatgcaaaaactcttcaacagccaggttttgaactttgaagtttataatatgattaagatggaacttaagtggcagtaaagtaatttttcttcaagatttagccaaaggcaaggcaaaggttaataagacacattcacagggtgcctcagagtgaaagacacctcactgggttctcctgcagattgatgggaggcctagctttctgtattgtgtgcattctgcagagagacatggctgggggaataacacttctcaaaatagaagaagcttgcatcagataggcagaggcaaaaataacacagcattggtctcaaatcggaagcccaagggcctattgtcctgttttctttggtccttggagggcttttcaagtactttaattggttgccaacatttaaaaatgaggagaagttatgtaagttccaaattatggcttctcatgaaggtttggaagattgacaacactgagctcacatcccacgtggcacgattttgctggagccaagggatgctgcccccctagattggcatgtgcctccagtgttgccacagtccttatgcctccctattcggtattaaacacctggcccctgaaggcattgagtttgatacccttggtctagagcgttgctcatactttgcctaggttcttttaggcattggcaggacatagtcatccatccaacaaatattttttagtgctcactatatgtgaagagatgggctaggtttggggaaatgtaagaaagtgagtaaggcctgggccccactatatgtgctcataacctggtaaaaagatgaaaaataccaaagatacaaggcagtggataagggccctacaaaaaaattacaaaagccgatgagtatatatgagggtagtttgagtcaatgataagaccccatgggcaggagaagggaccttctggaggatgctgtggaagtgggatcaggcccagcaccagagctgttccgacaccagaagtaagaggaagaagctttttgggttttgtttcttgttttaggacagaaaagaaaaagagagcaaaattagtttaatataaagaaaacgctaaatgtacctaggtttttaattttttttacatgttttcctgaattgtgaatcactttgtttaaacttaaataacaaagagattcttcactgattactgttattttgataaagagagagctttagggaaaagccatagtaactgccaggagaaagctctccactctgtctctatgaaactgttctggaatcttcccaaattgctctctgtggtgctggggggacattatcagcctctaatgaactattcttcctatctaaaatctatcaagtgaaggtaaccattacaatggattgggttgaacatgggcagaagattttgcaaagatcattaaaactaaataaggaagaaagactgcaaagcctttgttaacaagaaacaccctggaaccatggaagggagaaagaaattcacattttcctactttgcaaatgaagagatattgagactcaaatcttatctggtttccattaaagttcaaatacttggtggtgttagaaagacttaagattttttttcttattgaagccacaaaaggaaaatagagaaaaggctggaaatctgcataacccaaaattgaaaagttccaattatatcttggcttgtattttcttttgttctgttttttgttgtttttgttgttgttgttttgtgttgttttgttttgtttcttaggttattttgagacagggtctcactctgttgcccaggctggagtgcagtggcaccagcatagttcattgcagcctcaaactcccgcttcagcttcccaagtagctagaactacaggtgtgtgtcaccatgcccggacaatttaattttttgtagagacacggtctcgctatcttgcccaggctcgttttgaactcctggcctcaagtgatcctctcagctctacctcccaaagtgctgagattacaggaatgaaccactgcacctggccttggtttttattttctttaattgtttgttctattcatatcacatttaaaatgtaacattccaaatatttacttttttaaatagtcaatatctaagtttaaaacaatggaaaactgattcacatgatttttatatgagtttatacacataatgtgtagttcagaagatgtaaccaaagcaggctacgctccctgcattgcaggaagggtccatgagaaaggaggctgcttgcaaggactcgtcttatcactgcagaggtatatatgcttatagctatgtaataattcacatgagcaaactaacaaaagataatagcatgttttctcgttactattgtccttggcaggatattttgggaaaacatttctttggttttttttgtttgtttgtttttctttttgagacagaaccactctgtcgcccagcctggaatgcagtggcaccatctcggctcactgcaaactctgcctcccaggttcaaacgattctcccacctcagcctcccaagtagctggaattataggcatgcaccactacacctgctaatttttgtgcttttagtagaaacagcgtttcaccatgttggccaggctggtctcaaactcccgaccttaggtgatctgcccaccttggcctcccaaagcactgtgatcacaggcatgagccaccgtgcctggccttgggaaaaaatttctatgggctggaaaactatcacattcttcgcaggtaagaccactagtgtatagtaagagggctgtgtaccttaccagtttcctgtcttctgtccccaggccttcagtatcgtcttccagaaggctgtggagagggctgctcctgacgaaagcctcagggagcgggtggccaacctaatagacagcataaccttctctgtgtaccagtacaccatccgcgggctctttgagtgtgataagctgacctaccttgcccagctcacctttcaggtaaaagtggattgaagaagtttccagaaaacaggttatttttagtgcccagacagcaggtgttaagaaactttcttctttgaacatcactttccacagcatgtccagactatctgtctttggatagaggcatcagacaagaaggtccaatgtggtgtgtgcatctgcccccaccatttcccacttatggcagacatacttaatccatcattgtactttttcttgctgatcctggaagatctaagatcttcctcagcacagcactccagcagccactaccaatcaatcaaaactggcactgaagatgaaactagatgaaaccataccaataaccagacgctttttgaaatgctgtaagaaatttggtagagtatccatcattgtttatttacctttagactgcaagtttactgatgcagccatcccccgggataagaaattgcacaggtctttccacaactgtagcagccttgaccttagaaagttttcaataacgttggttctcaagggtttgggaagcagggatttccgatgttgctgcatctttaagaagaaacctttgtcttctagttattctcaacatcaaaaaaccatgaaaatttacttccttttttttattttgagatggagtctcactctgttgtccaggctggaatgcagtggtgtgatcctggctcactgcaatctccacctccccagttcaagtgattctcctgcctcaggctcccgtgtagctgggattacaggtgtgcgccaccaggcccagcgaattttttttgtattttaagtagagatggggtttcaccatattggccaggctcgtctcaaactcctgacctcaggtgatccacccgcctcggcctaccaaagtgctgggattacaggcatgagccattgcatctggcctaatttacttccttttacatgtccctgtaatcatttagaattgggattttttccaatatgtaaattgggagcacagactaattatctcgaaggccctttccttgaatcttctgatccgtagtcagacacgttatccattgcaccactggcccacggttgaaggccctttccaattccaaaagtcagatatcccatcatcacttgtgtgctgactctgttttcacctttcagggcctgcctgagttcatgggtgagtgttgctttgcctcacccctctcaccccctatattccccactccagcccagatgacagcttggcctttgcaaaaaaaaaaaaaaaaatgtgggccccacctctcagtgtgaatcatgagctcaaactaagccaaaggcttttctctcccctgtacacagctcactaattcccctatcaagcctctgctttttccatttcctactccatggaacgtcgtcccttctgtgaaaatatccccatctcttagcttctccaagacgcaatccaaaactacttataggaaagacacatacacacgtatgtttattgcagcactatttacaatagcaaagacttgaaagacttggaaccaacccacatgcccatcaatggtagactggataaagaaaaagtggcacatattcaccatggaatactatgcagccataaaaaagaacaagttcatgtcctttgcagggacatagatgaagctggaaaccatcattctcagcaaactaacacaggaacagaaaaccaaacaccacatattctcactcataagtgggagttgaacaatgagaacacatggacacagggaatgtcacacactggggcctgtcagggggtggaggggaaaggggagggagagcattaggacaaatacctaaggcatgcagggcttcaaacctagatgacaggttgacaggtgcagcaaaccaccatggcccatgtacatctatgtaacaaacctgcacgttctgcacatgtatcccagaacttaaagtaaaagaaaagaaaataaactacttatagaaagtttagtcaaattagtttcttcttgcccctcacttgctggtaacttctctactctgtaactcctttagcattatggcttcctatctgcatttctagctgccgtatatccatacgtcattttgacattctcctcagatcatgtcatttgtatgtgtcatctgctcaattagattgcagaaacatactccatggcatttatgattgatatgtaataaatgcttattaaccaagatatagtcactcgctgtgtgcagttcagtcactctcatatttggggtgaaaatagagggacacagtagtaacgtgtgtgaatatacacttccttccactctaccctcattaaacaaccaaaattgatgggcaaactagtattagaggcagtaataattatactgagtgacaacccctaagatttctaggactctggctacaagctaaagaaatgcagtatcatttctccacattgcagattctcctcatgaaccgagaagtcaatgcagtggagttggatttcctgcttcgatctccagtgcagacgggcaccgccagccccgtggagttcctctcccatcaggcgtggggagctgtcaaggtcagtattgacccctagaaaaaagccaagctctcatctctcagaatttacctctgacactggtccccatgaagtcagcagggctctctgttggagttcaagcatggagctgtgttaaacataggcgcatccctttccttgcgtccccacagtgagctcatctttcctgggcctgcagagaagaagcaggtgcatgctggtgtatgagggctctgcctccagggtgtgaggaaacagaaagttcctgtgagctcccctaagtcacctgagctgcttttcacctaccagggcttaaggctgggacatggcctcctcagtgagtccctggggttgatgtggagaggctgccacagcatttccataaaacagcaggtgccagtgctgtattcaggcatctgaatcctaactcagactcaaagcaggagtgcatttcagcctgggatgctcagcagttaataacagctcttatctattgagtgccttggaaatgcattaccttatttaattctctgtccacctgggcaataggtattatttgttcccatttaacataggaggaaacaggtcccacgcttaccagaagcccagaacacaatttttggtctgtctgatggcagagcctattttcattccacatcatgcagcttagtttagctgggattctatgagtgttgaaaagatcacaaactataaggttctttcagtaggtactatgcctgcaattcacagatcctgacacaatgcctggcagggaatgctgggtgaggcaacaccagcttgctccagagtccaggcctgcactccatgcaggcagttgagtgaacacccatgacgggtttcagcgccatgtgaggaatagcatctacataagatgaatcttgtttatgatctcccatgtttattgcattttacagatgtttagtagcacaaagaagtataagagtaaagtaatatgattggctttctttctccttatttttttattaaaatggtttattttgagacaacaattcatatgcagttttaagaaataatacagagatatcccttgtacccagttttccacaatggtaacatcttgcaatactatagtacaataacacatctgggaaattgtcattgatacaatccagaaagttccaccattacaaggacttctcatgttggccttctataaccacaacaacatcttcccttacccagttcccaatacctaccaactacgaatccattctccatttgtataatttgctgtcatctcaaggatgttacataaatggaattatacagtatataaccatgtgggattggtgtgctcatttagcatgattccctcgatatccgtccaagtagttttactttataactaaaacctagaacttaattatttatatacttgccgtccccttcaaaggagtcatctcaggaaattctaggctcattccattaatgctaccatttctcaaagatagttttctaacttctttttcagagcctgtattgctttaaccaactttaggactgtatctaaatcaagagttgtcccactttttctgcaaagggccacttagtaaatatcaccatcttcccatcttcacatggctgtcttccctttgtgagtcctgtctctctgcttcttataagagcaccagttatattggttagggcccatactagtaactccatcttaacttgattacatctacaaagaccctatttccaaataagatcacattcacaagtccaggagattagttcttcagtatatattttactttggagggacacagttcactccataacaattatgagggccacttagactttgtaggccagactctgtagcaactactcaactctgccaaagccagtcacagtataagtgaatggacacggctgagttccaataaaactttattgacaaaaacagatggtgggccagattgggcctgcaagctgtagtttgccaatctctgatccaaataataaagttgtaatttgatttttatttaattttatttgtcattctgggcccaatctggtgaatgagaagggaaataatatactggggaagaaataagggggtactccattcacaacagaaacccaaattacaaagttacaaaatgcctaagaatgattaaataaatgcagagaagtggaaaccatccattttcctgggctacataagatacaaatgaatagacacactttaaagtagcaccgtccaaaagaaatataatgcaaaccacttaagtaattttaaattttctatagctgcattaaaaaatgttttaaaaatggataaaattgactgggcacggtggctcacgtctgtaattccagcactttgggaggccaaggtgggcggatcacctgaggtcaggagttcaagaccagcctggccaacatggtgaaaccccgtctcaactaaaagtacaaaattagccgggtgtggtggcacacacctgtaatcccagctccttgggaggctgaggctggagaatgggttgaacctgggaggtggaggttgaagacagctgagatcactttgcgctccagcctggatggcaagagtaaaactccgtttcaaaaaaatggataaaattaattttagcaagatattttctttaagccaatacagccaaaatattatctcaatatgcagttgttataaaattattactaagatattgtgtacttttatactaagcctttgaaatctggtgaatattttttaaacttatagctcatctcaattcagatgccaaattttcatcaaaaatatttgtattgagattccataaaattgattgattcatatacccaagttgttccaacaatctttagaagttttccaattaataaaacaagtcctattttctacacttgaatttgaagaccattaaaattaaatgcaattaaaaattcagtctctcagtcccaccaaccacatttcaagtacttgggagtcactcatggccagtggccacctcataggacagtatggtccagagctagacaataatttcttgtagtctgatgcttttacggaaaataagtttgttctgtaaagcggttctgaatgaacccctttgcagaactggagcaatgatggagatggactaattaacacaggctctggagtcagacatccctggattcaacttcaagtttgtgtgtgtggcctctgacatgttgtcttattcctctgagccttggtttcctcatctgcaaaatggtcgtcgtaatacctttcttagaaggctgtgtaagacacggagtaaatgctaaaccaatggaagctgattggttatggttgctgtatttgtttcctagagctgttctaagaaagtactacaatggagtggcttaaaacaacagaaatctgttttctcacagtcgtggaggctgaaagctgaaattaaggtgtcagcagggccgtgctccctccagaggctctagggaaggatgcttccttgccgcctccagcttttgatagcccctggtgtcttttgctttgtggcagcataactccagggtctgtctccatcttcacatcttcacatggctgtctggctgtcttctgtgtccctctgcgagtctctgcctttccacttctttcttttccttttctttttttttttgaggcggagtctcgctgtgtcgccaggctggagtgcagtggcgaaatctcggctcactgcaacctctgcctcccgggttcaagcgattctcctgactcagcctcccaagtagctgggattaccggcgtgcgccaccacacccagaaaatttttgtatttttagtagagatagtttcaccatgttggccaggatggtctcaatctcttgacctcatgatctgcctgcctcggcctcccaaagtgctgggattacaggcgtgagccgccgcgcctggccctttccgtttcttataaggccaccagtcataatagattagggtccacactagtgacttctttgtgacttgattacatctacaaagaccctatttccaaataaggtcacattcacaagtccaggaggttatttcttcaatatatattttggggagacacaattcaccccataacaattatgatgactaatcacccagctatctggtgtccacatgctatagtcgatatggattgtactgcatagaatttgtccaaagaaggaaaaactttcaggaactgtgagttgtgcagtttggaccaagtccagttgcctctgttcgtattaccccacaaagccctctgctgcaaaagtcataaggaataaatgattcacaagcactcttcagtactttcattttacaaagctcaacccaaaagctacgtacaatttagtttcattcctcttttcacgaaatggattgtttggttcgctttgccttgcttcactttgcttttttgttttgttttgtgggctaagctcatctggctgttcaaaggcttttgccaactagggaagctttatctctctatgtgaatttgttaggaagagcagcaaagtccagaaccatcaaactcaagcacagcacaggatatgagcaggtgaaacacaatgcattatgtagtactcgttgccaaagcctttgatgaatgctctttttaagtgtttggttggattttagcctaaagaaacaaaataagtataattgaataggacatgattttttaaaaaaaaaaatttaagcattgtatctcgtgatgaagactgattgctttgtttccccagaagaactaataagcaggtaatgaatgaaatctttgtgataaaatactgcttttattaatatcctttgtaagggttttttaggtcccatcaaatgtagaactttcaggtaatgggcatgttctgttgctcattagaaaatctcatctgcgatgaaggcctttgttagcctttgaaaaggccccttactaccagtctggttgccaatttagctcggttgtattttgctacacagtccaaagtaattaggttaattagtcatttccatttagcttattagaaggctagaaatccctttgcctcatttggaagattaaatgttgcaattgtattcaatctagagcttcaagaaagtgtgtttcagatccagccctggcagctgggagcactgatcacagtgtaatttgctcagttttgtggagacgccagagggggttgcaggactgcagaagggttaataatgatgcaaactgggaagagggggtgagtggctgcctgaaagaagatgaaagtcagctcctcggcacagagagaaataattacagcagctgcagctttctcagcctgtcaagagccctcctgctggccaggcagatgtcaaatcttattaactgagcatttcctaagtgccaggcaccctgctaggtctaaggcgtacaaagaggcctacaaaagttcttgcccgcagggagctcacagtcttgtgggagtaacaggcaagtaaaccagaagttgcaattcaatagccataggagccccccaggaaggaaaagggagagctttgtagccttcaaagcatttgtatctacataacagtatgagatatggcagaccacatgacttggcctcattttccaaatgaaaaaaaaaactcacaagggttttaaaacaggctccaagtccactggctcaaaagtggtggtgctggggccagaactccagtcccccggtgcctcctgctccactccacacaccactccacacgacttatctgcaccattgaaggatgattccctgctgtaagtgatcagggtgaaactgggaagccacagagcccatgtgaaggaatatgtaaagccaggacatgtgttcatttccacgggacaaaagcctctgcaagccccggtcacatgcctctgtccttctccagctgttcctgtcggtggtaaggcaaaagactcctctgcagcaatcacgctgcttcctgtcaggccccacactctccctcctccaggctttagctcttcttgatccttcccctgccaaaaaaaaaaaaaaaattccctttccttcactctacctccatctctgcccagcagaattctacatacctaccaaggcctccctcatcttctttttccctaagctaggactgcaggctcctgaaaggcttgtgttttttgttgttgttgttttttattattttcttccccagtatctggcaggtagtaggaattgaataaatgtcaaaagaatgaacgaatgaatgaatgagttcaaataaaaagattatattgggtgcctaaaaactcatggcactgtggtaggtgctttagacacgcagtctcgtctagcttttcatgtcattggggaaaccaggcattcaggcagagttgagtaatgaaggcaggactgcaggtaattaagtatctaagtgagtgatgttgatgtgggcactctaaagaaatagaacagacctcctacacacacacccaaaatacagttccaacatcaagactgatgatgctacatacatactaagagggtatgagaaagtttattactcagataacatggttttctaggaagagcaaaggagctcccaagcaggctgcaaatggcttgagagtgccagaaaaggagactgctttgggtattatgatgcttagggggtggggccagggtgagggtgtctgtgcatgggcaggggcttgcctggtacaacttccctccagcaccaaaagagagagtgcccagggcagaaggggaagaggaaaggatgaggtttaaaagctatcagcagtcaaacatctaaaaacgaagtcaagctctttattaaagatgtcaactctgcaagtatctctaagtcaggggtgttcaatctttggcttccccgggccacactggaagaagaagaattgtcttggaccacacataaaacacactaacactggggccgggtgtggtggctcacacccgtaatcccaactctttgggaggtcgaggcgggtggatcgcctgaggtcaggagttcaagaccagcccgaccaatatggtgaaaccccgtctctactaaaaatacaaaaattagccaggcgtggtggtctgcacctgtagtcccagctactcgggaggctgagacaggagaattgcttgaatccaggaggtggaggttgcagtgagccaagatcatgccactgcgctccagcctgggcaacagagcgacactccgtctcaaaacaaaacaaaacaaaaaacacgctaacactaatgatagttgatgagctaaaatatatatctgtcacaaaaaaactcataatgtttcatgaaagtttatgaatttgtattgggccaccttcaaagccgtcctaggccgcatgcagcccaagggccatgggttggacaagcttgctctaagtggtttacaaaaggatgggaggtctacatgttctacattaggaaggatggcccaagggaggttgcaggttttgaactggtctttcacaacctgtagagccttaacatataacaatcgtgaccagcacaagaaaaggaagaagtggaatgtggcagaaaagaaaacaggactttacagatggtggaagtagtatgaacaaggaaatgagttgggaatgagtcaggcacatttccaaggttgggagcagatatgctcagagtgggacagagtaggaggacacatgacttactggacagattgaagagaggcaccagatgaagagatctggctaccaagttatacatttggactgaatcctcatagaaatagacaacccatgggcattttaagagttggcgttaacacagagtacatgaataattctagaaacattttgagaggtgaactgacagggtttggtggcagagtgagtttgaggaggaaagggagaagtcactaactttaggtgtccaagcttcaagaccagaataaccataatgccccttcttgcccctcttttccatgtacacacctacaggcaggtgtggctcagtctctgctgctaataatatcccaaacattttatgcgctaaatcttgcatgttattggggcactttgctaagctgctcaaaattcttcctctttcttgatttttcctgggggatgatccaaagctctagacaagagtataaatgagacagaattgtgtagataagaccatctggcccctcaatcccccaacacaatgcaaatgacagctttctggagaaactgcatttcagattctctgaaatttcccaggtactttcatcaatggaagaattctctaatctggatcgggacatagagggatctgctaagagctggaaaaagtttgtggagtccgaatgtcctgagaaagagaagctcccacaggagtggaagaacaagacagccctgcagcgcctctgcatgctgagagccatgcggcccgaccggatgacctatgctttgcggtaggaaacagggtggtggaaggcccagcataggcatggggcaagggcaacctcaggacaactggaccagcagggctgagctccaaagccatgtgtatatagtagtttcctggagctagagggtgggaatagaaattaactaaacaggccaggcgcggtggctcacgcctgtaatcccagcacttcgggaggccgaggcaggtggatcacaaggtcaggagttcaagaccagcctggccaagatggtgaaaccccgtctctactgaaaatacaaaacttagcctggcatggtgacaggcacctgtaatcccagctactctggaggctgaggcagggaattgcttgaacccgggaggcagaggttgcagtgacccgagattgcgtcactacactccagcctgggcgacagagtgagacttcatctcaaaagaagtaaaaaataaaaaaaaaaaaggaaattaaatagccatagccataaagaatctcactggtgtgatataaatgttctaaaacggggttatggtaaagactgtacaacttggtaaatgtattaagttattgaatagtacacttaaaatgggaaaatcctatggtatgtcaattacacctcaataaagttatttttaaaagaaaaaagaagttgtaggccgtggagtctatactggataggaaaggagtgattagagtaagggcatgatagaaaaataccagggagggcccgggcgcggtggctcacgcctgtaatcccagcactttgggaggctgaggcggcggatcgcttaaggtcaggagtttgagaccagcctggccaacatggtgaaaccctgtcctactaaaaatacagaaaaattagctgggcgtggtggcgcattcctgtagtcccagctacttaggaggctgagacaggagaatggcttgaacctgggaagcagaggttgcagtgagccaagattgcaccaccgcactctagcctgggcaacagagggagactccattttaaaaaagaaagaaggaaggaaggaaaaataccagggagaccaagatactgaaattcctccattcgtagtggccccagtacaggcaaagaataggtgaagtcaggttagattgctaaggataaaaggcttgggtcaaagagtgagatgttcccatttgtgtgtcctaacatttaagaagtttccaagtaatgacaacgatgagcatgtggctatagaattaggttgctaaagggggagaaaaacagagatctcttgagctgaggtcactaagaatctacaggattgtccacatggatgttgatgtcacccaggctgaaagagaaaaagacagtgaaagaggagagtgactgaaggggaacagatgacattgatgtgcaggggcagtggtgacacagccaggggaaatgagcctctgaggagccacaagagtggggagggggccaggcacagtggctcatgcctataatcccagcactttgtcaggccgaggcaggaggatcacgaggtcaggagttcgagaccagcctggccaacatggtgaaaccccgtctctactaataatacaaaaattagctaggcatagtggcactcgcctgtagtcccagctactcaggaggctgaggcaggagaaccacttgaacctggtggaggcggatgttgcagtgagccgagatcgcaccactgcactccagcctgggcgacagagtgagactccatctcaaaaaaaaaaaaaaaaaaaaaaaaaaagaatggggaaggaatggcttgaaaacagtagtgggcagtgagctggaccctgattccgcttgccaatcctaaggcaggcgtaggagaatgagcccagtcgagaaggctacagggaaaatagtgttcctgggggagagtgcaagtctctgttaagaccaggagctgggtcagatgttcaataagtggttatagctatgaagatttgttcagcataaaatgtgacactttggacaggaacactggtaagtggagtgagatgaaagaagagagagaaaaataaaacatgagagaataggctgggcgcggtggctcacacctgtaatcccaacactttgggaggctgaggcgggtggatcacaaggtcaggagatcgagaccatcctggccaacatggtgaaaccccatctctgctaaaatataaaaaaaattagctgggcgtggtggcaggcgcctgtagtcccagctactcgggaggctgaggcaggggaatcacttgaacccgggaggcagaggttgtagtgagctgagattgtgccactgcagtccagcctggggacagagcgagaatccatctcaaaaaaaaaaaaaagagagagaatagcgtaccgtagggccttaaatcttgggcaaggctggtagatagcagggagagagcatatggaggatttaacttaccagctttctgaaggtactggcgctaacagtgtcctgattggtggggtgatgtgagaagccaccaggctcccctgagggagtcagcgatggcctgcctggatggggcttcagaggaagcccagatccaggtgagcagctcggcaactagcagcacaaggttgtgtgttgacttaataagcagtggacttggagccagtcctagctctataactacctagcccatgaccttgagcatgttctttcatttctataggcctctatttctcaaatgttaccattttgtggctgctatatatgtataaatctatatgtgctttttttctggcagagattttgttgaagagaagttaggaagcaaatacgtggtgggaagagccctagattttgcaacctcatttgaagaatcgggaccagccactcctatgtttttcatcctgtctccaggggtggacccactgaaggatgtagaaagtcaaggtgagaaaggcgtcctcttggagccagggctgcatttgccccatgcactttcattcttggggtctattgatttctcttttctggattcaagcttcaaatatgcaacactgcaaatcatacagaagtcagggtcattgctgaaataaaatcagaagatcacccaccagggagagaaagagccactctgggctgtaaaaggcagaactcacagtcccagtttcatgaggaggcctcgtcccctccactctgcctcacccatccccttatcttgccagagcaatctttctgaaatactagtatgatccttccacagggccccacagtgtggcgattcctcaaagacctagagggagaaataccatttgatgcagctatcccattactgattatatacccaaaggaatagaaattattctattaacattataaagatacccgcatgtatatgttcactgcagcactattcacaatagtaaagacatggaatcaacctcaattcccattaatgatagactggataaagaaaatgtggtacggctgggcacggtggctgacacctgtaatcccagcactttgggaggccaaggtgggtgaatcacctgaggtcaggagttcaagaccagcctggccaacatggtgaaaccccatctctaccaaaatcacaaaaattagctaagcatggtggcaggcacctgtaatcccagctactcgggaagctgaggcaggagaatcgctggaacctgggaggcagaggttgcagtgagctgagaccgcactactgcactccagcctgggtgacaagagcaagactctgtctcaaaaaaaaaaaaaaaaaaagaaaatgtgatacatatataccatggaatactatgcagccataaaaaggaatgagatcatgtccttttcagggatgtgaatggagttggaagccattatcctccactaactaatgcaggaacagaaaaccaaacaccgaacgttctcacttaaagtgggagctgagtgatgaaaacacatgagcacaaagaggggaagaacacacactggggcctattgagggggtggcagaggaagagcatcaggaggaatagcttaatggatgctgggcttaataccgaggtgatgggatgatctatgcagcaaaccaccatggcacatgtttacctatggaacaaacctgcacatgtaccactgaacttaaaataaagttaaagaaacaaaaatagaatattcagcatgtccaacttcaaaaccaaaaaaacaaaaatgataaggggtggtggagaccaaggttttttcatgcagtgaagcctccaggtagcaggcttcagagagaatagattgtaagcgtttcttatcagacttaaagagtctgtcctggccgggcacggtggctcacgcctgtaatcccaacactttgggaggccaaggcaggtggattacctgaggtcaggagttcgagactagcctgaccaacacagagaaaccccatctctactaaaaatacaaaattagctgggcatggtggtgcatgcctgtaatcccagccactcaggaggctgaggcaggagaatcgcttgaacccaggagtcagaggttgcagtgagccaagaccacactatagcactccagcctgggcaacaagagtgaaaaaaaaaaaagagtctgtcctatcagtaattccaaaagaaaggagggtgtaatgaggcatgtctgacccccccttcccatcatggcctgaactagtttttcaagttaactttggaatgtcctttgctgagagaaggggtccattcagaatggctgggaggcttaggattttatttctggttttcaagtctagtattgattatggaatgaaagaactaacagcatatgctttgtgcctcaggggaggagagataaagctaactaggccctaaagaacgaataagatgtgcataataaaatcagtaatagagaagaattaaaaatgaaaagcaacagcccccagcaccagccctccagatacgcagtcccccttcccaggccctatgcttttgtccatttctgaatttagttcctttgagaattacttctcatttcctagtaataaccttatatcaccatttttgtattagcagttttagataaagtgtctattcctgatatgaaaaacaaggatttagcgtgcactgtgttctgtctgtgtcgtcttagattctgtatgtgtctgtttggcactgaagcatcacagggccaaatgcattaactatacagtcttccctccacatacacggggtggggactgggaggtattggttccagtccttgcatatcccagtcccatcaccggccctgccatttgtatatacaggcttcacatctctcaaatactgctgtattttcatctgagtttggttgaaaaaaatccatgtgtaagtggacccacacaattcaaacctgtgttgttcaagggtcgactgtactctctttttctatattcttctaaaacaaattttttaattgacaaataataattgcacatatcaatgagacacatagtgaagtttccattcacataatacatagtagtcagatcagggtgattagtatcatgagcagcacaaagtcagacataaccagatccacagacatttgtgtctttctacagtatcagtcttttactgatgctattccaatcataaaagccacaagctttacggaggtaattcttcttagtatatcccatttactcggtagtcagagctgtaggcacacaggctcaagccattccaaaagtcagtcgatattgcaaaccatacataatggtatactaaatcaatacaaatgttacagattaaacattccacatcaaacgaagtaacatctaacatcaagagaaaggggataggaaaatgggttaatgaaacagtccaaggggagcaatgtggacaaaaagaatctcctgtcctggtctgggcagtcttttaacgaaccacaaggaagagtctttgatgtgggcagagccttccgcggatgccgggtgtttatcacaattaacagcaagaccagtgtctgtcaagatggctgttctgagccagtgaagtcctctggtgaggactgatagtgggaaagtgtgcctggttatgtccttatctggttgcatgcagtctctactgattaggcaaacatctggtccctgttggtacgatgccttttaaaatgtaagatggagtcttttgctaagatggaattacttatgctccatacattagcatatccacgaactcaaacatttaatcatttccttgtgttgggaacgttccatatccaccttctagctacttgaaactatataatatgttattgtcaactatagtcttgatgctctggcatttgtggcctcactgattggagagagactgctgctcccaaagctagccagttcttagagatcacaaaaggctcacctgggaatatgccttttgtaagcaaaataaccatccagagtccacactcccaatcatcccctttatctaaatcacacaccaagccaacatccccactggcctaaatcaacccagggccaggtaccagactagtaaggacagtccctatgcccccaaaccacgagagttactcaaattagccggtcttgaactgtctcccctgccttgccttgtgtttctcagggaaaaccccaataaagaccctggcctacgatttccccttgctccttcctgcctcttgaccaacctggtgctcccccatgtggctttgcacatatggtgcatcccctgatctcaggaaatgtaaggaataaaaatctttcagtggcatttgcccctccatgacatcatccagactcctcaatcaatgaacatcccacaggtacagatgagacacgctgctgcccaccaagactctcctcgtgctcccaaatttttcaacagctgcactgagatataattcacaaaccatacaattcacccatttaaagtgtgcaattcaaagcattttaggatattcataaggctatgtgaccatcaccatatgctaattttcaaaactcttgttttgaaaccctacatccactagccattactttccatggcatctcaccaccttcccaggcctagtcagccatcatttactttctgtctctaaatatttgcctattctcggctgggcgtggtggctcacgcctgtaatcccagcactttgggaggagaggcaggtggatcatgaggtcaggagatcgagaccatcctggctaacacggtgaaaccctgtctctactaaaaatacaaaaaattagctgggcatggtggcgggtgcctgtagtcccagctactggggaggctgaggcaggagaatggcatgaacccgggaggcggaggttgcagtgagccaagatcacaccactgcactccagcctgggtgacagagtgagactccatctcaaaaaaaaaaaaattgcctattctggacatttcatagaaatgaaatcatatacaatatgctttcttgtgatgagcttctttcatttggcataatattttcaaggttcaaacatgtagtagcatgtatcagaactacattctttcttatggatgggtaatattccattgtatagctgaaccacattttatctctctattcatctgttgatggacacttgggctatttcatcttttagctgcataaatgatgcttctatgaacattcatgtaacaagtttttgtgtgaacataagtttcaattctcttgagtatatacctgggagtagaattgctgggtcagatggtgactttatgtttaactctaaggaactgccagactgttttccaaaacagatgcaccatttcactatcccaacagcaatatgcaaattccagtttccccgagtcttcaccaacacttattatccatcttctgattagagccaccatagtgggtatgcagtggtagctcactgtggtttggatttgcatttcccaaatgatggtaagtgtcctttttatgtacctattgggcatttctccatcttatttggagaaatgtctattctattccagtttttaaaattaggttacttgtccttttatcgttgagttataagaagagttccttataaattctgtatacaagtttcttatcagatatatgatttccaaatattttttctcattctttgggttttctagttgcttttttaatggtattctttgaagcagaaaatttttatgttaaaatacaatttatctatgttttcctttggccacttgtattttaatactatatttataaaacgattgccaacctaaggtcacaaagatttactctcccttgttttcttccaagatttttactttttgttattacatttaggtctataatccactttgagttaatgtttctgtatgtaaggaaagggtccaactttgtcccttgacacgtagatatccaattgtccctgctccatttgttgaaaagactattctttcccggttaaatgatgttagaacccttgtcaaaaatagaccatcattgtaagagcttatttctggactattatttatatcacattgatctatgtatctatctgtatgccaaataacagtctcaatgactgtagctttgcagtatgttttgaaatcaggaagtatgagttcttcagctttgttcttttcatgattgtgtttgctactctgggtctcttatattttcttttttgttgttgttttctgtttgtttccctcattcttgctgtcatcttatgtttcatataattttagaattggcttataaatttctgcaaaaaataataaatgtagcttgaatttcagtaaggactgcactgaatatgtagataagatctagagagtattaccatcttaacaatataaatctgatcagtgaacatggattgtcttgccatttatttagctttctttaagttcttttaactatgttttgttgtttttagtgtgattgcttttcttttattaaatgtattcccaagacttttttcttttagattctgttgtaaatggaattgtttccttaatttcagttgctctttacatactgatcttcttcaaacttgctgaaactttcttgttagttctaataattccttctagtgaatttcttaggattttccagttacaagaccatgttatctgcaaattcagatatttatgtttcttcctcttttatcattatatgttcttttttttgttgagatggagtctcgctctgtcaccaggctggagtgcagtggcacgatctcagctcactgcaacctctgcctcccaggttcaagcaattctcctgcctcagcctcccgagtagctggaactacaggtacacgccaccatgtccagctaatttttgtatttttttagtacggacagggtttcaccatgttggcaggatggtctcaatctcttgacttcgtgatctgcctgcctcgacctcccaaagtgctatcctcatatgttcttatttctttttgcctaattaccctggctagaatttccagtacactgttaggtagaaatagcaagttcagacttccttgtcttgtttgtgatctaaggggaaaaaaatcagtcttcatcattaagtatgatgtcagcagtggattttttgtagatatcctttattggattgagaaagttgccttttattcctagtttgttgagttctgttttattgtgaaaagttgttgggttttgtcaaatgctttttctgcatatattgtagtaataagatagttgtttctttattctattaatattgtatattatattattgatttttagaagttaaaccaaccttgcattcctaggatctcagtcagtcctggtgtactagtgtataattctttttatgtattactggactcaatttgctaacattttgttgagaatatttacatgtatattcacaaggtatattgacctgttgttttctttctttgcaatgtccttgtctgttttcagtatcagaataatgctaataatctatacatcagaattagttggaaagtattccctgtgcttttatttttttttaaagattttgtaggccaggcactgtggctcatgcctgtaatcctagcactttgggaggctgaagtgggtggatcacctgaggtcaggagttcaagaccagccttgtcaacatggtgaaaccccatctctactaaaaacacaaaaactagccgggcatggtggcacatgtctgtaatcccagctacttgggaggctgaggcaagagaattgcttgaacctgggaggtggaggttgcagtgagccaaggttacaccactgcactccagcctgggtgacaaagcgagactctgtctcaaaaactaaaaaagattttgtaaagtattagtattaattctcatgaatgtttggtagaattcagtgatgaagccatctgggcctgagtttttttgagtaagaagtttttaaattattagttcaatttatctttactagttatatatttactcaaagtttttatttctctttgagtcacttaccataatttatttctttctaagactttgtccatttcatctaagttatataacttgttgataaacacctccttaattttgatatctatattaaagtgtttagatcatctgttgggtatgttataactaaatgctattagaaaaacaatttattgtccgggcacggtggctcatgcctataatcccagcactttgggaggccgaggcgagcggatcacgaggtcaggagatcgagaccatcctggctaacacagtgaaaccccatctctactaaaaatacaaaaaattagctgggcgtggtggcaggcacctgtagtcccagctactcaggaggctgaggcaggagaatggcatgaacccaggaggtggagcttgcagtgagacgagattgcaccactgcactccagcctgggcgacagagtgagaccccgtctcaaaaaaaaaaaaagaaaagaaaaagaaaaagagaaacagtttcatattccacaagttttagataattcttttgacttctttctaggtaagctaaagcttccatttctcatcttgtgtcagctatgtctttgtttttgcatagtcaagaatgaatgcatattcattctactctgttactatcattaatttcatgcatgcctagtttatgggttaatttttaagttgaaagccaataaacagcacatatattctaatatatgtaaatatatcattcactgcaaaggcaagtaatgtctaggattacacttccttctttttgatcaaatgtcataatctttagggggtctctaaaagaagaatgttcttagcacagaggttcaaaacatgtcaaatttcagtttgctttataggtgatgataatttttgtagcttttagttttctttggagttgcaagttgccttttatttatctcaggagaagaagtaaatgcttcacttatcattgtcactacctttttattcgttctctatattggaaagactgcactttattcttcttgaagatactctccctggagctcactgacatcttcttctaatataaataaattgtatttcagccttctaggaagctatcatcctgggacctattttctttatattctaaattagttctactgtctttatatcccatgtcttttattttcaattctccatccttactttgctggcataaattatcagaaaagactcatgagaagtaaaaatttggaatccttgggtgtctaaaaatgcttcagttttgcttatatagcagtttgatagtttttcaaggtccaaaatggtttttatcagaactttggatacatgattctattatcttctagaagccagttttgttcatgagatatcatatgccagtgaaattatattctttctttgtttctttgtcggtgacctgtttttattccccgaaaactttagaataatctctctaccttgtgttctgaaatttcataagctgtgcctagttgtgggtccttttcattcatctgctgagcagtcagcctgtcatttcaagtggaagagtcactaaaacttttgagctctaaaaatttttctgttatatttagtaaatgccaccaccatttaccaagtttctcatgccagaaacctgggtgtcaatcatcctagacacctcttccaccacccacaccacatttagttctattgattccacctcctaaatatgcttcaaatccatctaattgtctctattttcatgattgccatcctagtctgaatcaccatagtctttcacctggcttattacactagcctcctagctcatctccactcttcttcctctgcaaacccttgccattctgcagccagagtcatgttgctaaatctcaaatgtgattgtatcactcttctacttaaaactttctagtgacttcccagctgggtgcagtggctcacgcctgtaatcccagcattttgggaggccgaggcaggcagatcataaggtcaagagatcgataccaacctgtccaacatgctgaaaccccatctctactaaaactacaaaaattagccaggcatggtggcacgcacctgtagtcccagctactcgggaggctgaggcaggagactcgcttgaacctgggagacggaggttgcaatgagccaagatcgcaccactgcacttcaacttggcgacacagagactccatctcaaaaacaaacaaacacaaacacacacaaacaaacaaaacaaaaaactttctagtgacttcccactggtatagtccaatattaacatgacctgtgtggcctgcatggcatggcttttctgtccagcttttagatcctgtcacaccatgagccttcctaacctaggacattggcacaaattgttctttttatctgaaatattttcaaccatccaatgcctactcatcctgcaaattaccagccatttctggcctccctggaagaccatttgattctcaactagagattcttacagcactctatgtatttgcttcagagcatttaatacaattttaatttaatcattctgttataattttaacttatgttttgcctacctgcttgtcattaacatccttgatgaccatgtcatcttgttcatttttttaccactgcctaatagcataactagcacagagaagtattgttgaatgaactaacaaacgaacaaattaatgttagcagaactgttatcagagctaagttattcctgactttcacactttatagtctgtgttccttctgtcccctggaggctttgttccttttatacagataaatttagtttcctcatttttattcagtattttcccctttggaagctttcatataccctgtttatgagcaatttcctattgttcttagccaattgacctccaactactccatcacgtagtttgcagcttcctgtcatctcaggcaaactgacccctccctgatctatatgggttgtttgtctcagaatacgttatctcagccctgcccttggcttaatcttaatggatattttcttaccagaagcaatattgctgttcatcaactagagattacttaggcacctgtgcctctctctctcttccttcctccctgccttcttggtgctttgatttattttctaattcacccatttaggacatatattctggtgacatccacatttcccacatcttgaatctaatcagcttgcctgatgggctcctagtctcaagtctggaatccacatggctgatctaaacattttccccatgtccccaagccccagtttattaagtaaacttactgttttattgcttgtgcagagtctgtgtatcacacagttcactgtcttcctccgtttagactcttaaaaagcttggaatcatttctcctctttgggtatttgatttaaattctttactccttcatttacgtattcttttgcttcaacaaggcagttcttaatatcaggtagagttttaaaacccctagattcagattcaagatttgttccttggtccttcctccacccccgaaaaatgcacatacccacagacacacaacattctgtatacgattttgagcatttcttcagtccctgaagtttatccattggccaattaataattaataattcccttgattaggaatctataatttgtaggcacttttgtggcactcagtctcctccaggatttttcttcctcaacaattgtgaaggaggaggaggggaaggaaaggaaagtggagaaagaagtgaggaggagaagcggggatggagtggggaaggggaaaattccatccactcttcttggcctctgttttctatttttttgttttgtttgttttgtttttttgagacggagctttgctcttgtcacccaggctggagtgcaatggcacgatctcagctcactgcaacaacctccacctcccgggttcaagcgattctcctgcctcagcctcccgagtagctgggattacaggcgcccaccaccattcctggctaatttgtgtatttttagtagagatggggtttcaccatgttggccaggctggtctgggactcctgacctcaggtgatccacccgccgcagcctcccaaagtgctgggattacagacgtgagccaccacatctggctggcctctattttaacacgaaagctaccaccatccaccctcactgttttccttcttgccttctctgatcaagcctttaacagagctttcactgtactcatctctcttttctcatcatctttttccctaaaggagccacacttccttatttgcttgtttatttctgcttttgcttcatctacttcccccttgttctcaatcacccatgatacctgcctccttgggttactgtgaagataaaaacaaaatgtcagatgtgaaaaggctttgaaaagccgagagtacagtagcattgcatggcgttacgatgaggatggtgcatctgttctttggggcagctcagtttgcccttccttcacatctttttgtcacatcctctcaaagaacagtctcctccttggccctccccttcttgccctgatgccggcatcttctctggtctttctttcacttgtctgcagcatcatcttgcttggtctccatccttctttgcccaattacctggctttaacaaaatgagttctgtctttccattttctgatcagaaagaagctgtgtatcccgcctttgtcttctactgtctccttttctctccaacgttctgagatttttgtaggcctgctaccagatatgttcaaagaaacagttttccattcagtgtctttgcagccagattctcgaaactttgctttgggtcttgttttcattgttcctgaccccattcttttttcttgtatttggttgggtgtttttttgttttgttttgttttgttttgttttgttttgttttgttttgagacaggctctcactgtgttgcccacgctggagtgcagtggcgccatcttggctcattgccacctctacctcccaggctcaagtgatcctcttgcctcagcctcccaggtagctggactataggcatatgccactatgcccggctaattttttgtattttttgtagagatgggtctcactgtgttgcccaggctggccttgaactcctgagctcaagcaacctgcccacctcaacctcccaaagtgctgggattataggcatgagtcaccacacccagccctcttttctttaaaaggcaagtaaaagatagataagctgaggcaagtacagtctttagagagaggattcaggattcatggagtattgtttttttgtggtgagcgaaactgatttgtgcatgtgctggggagcagaagagtgaatagagacaaaggttaaagatacaaaaagagggccgggcgcagtggctcatgcctataatcccagcactttgggaggccaaggcacgcggatcacctgaggtcaggagtctgagaccagtttagccaacatggtgaaatcccatctctactaaaaatacaaaaattagccgggagtggtggcacgtgcctgtaatcccagctacttgggaggctgacacaggagaatcacttgaacccaggagaaggaggttgcagtgagctgagatcgtgccactgcactccagcctgggtgacaagcgagaaactccatctcaaaaaataaaataataataatttttaaaaagatacaaaaagagatgggatttaaatgacagttaaagtgacaggcaggaagggaggaggacatctttttcattgacagggcagtgtacagaaatgcagacaaaatggcagtaatggaggcgtgtccaccagagggcatgttttttcagggaattaagacagtagagcaaactgctgagcataagaaaaggggttcatggcggggcgcagtggctcacgcctgtaatcccagcactttaggaggccgaggcgagcagatcacaaggtcaggagatcgagaccatcctggctaacacggtgaaaccctatctctactaaaaatacaaaaaattagccaggcgtggtggcgggcgcctgtagtcccagctactcgggaggctgaggcaggagaatggcatgaacccgggaggtagagcttgcagtgagccgagattgtgccactgcactccagcctgggcgacagagcgagactccgtctcaaaaaaaaaagaaaaaaaaaaaaaaaagagggatccattaggagacataatgacagagggaaatgggtaacatagccggcttctggacacattgaaagagtaccaaagcgcttcgaaattgagaatcacaagctggtgatggtgccaattcaccaaacatgtgaattattccttttattaatacttaaactcagagttggggtcttagaaagttgagtagtaagtgcggaagtagaaggaggcaatggagttgaggacttgggctcaaattaaggattattgggtccatattaaaataagaggaggtaaagctgaaattagaaaaaaacgaagggaccaaaggactcaacatttcactgaagtagaaaaataggtggggaagaaataagaaggtaaaaaaatttaggaagtaggaagtgaaattcatgagtggacatggaagaatcatgtttcagacacaggacagatctccatgatgggagagccctgggtgtggccactgggaatcggcagcagaaatgaaatggagctaagttctttcttttttttttttttttgagacagagtttcgctcttgtcgcccaggctggagtgtgcaatggcacaatctcagctcaccacaacctctgcctcccaggttcaagcgattctcctgcctcagccccctgagtagctgggattacaggcatgtgtcaccatgcctggctaattttgtatttttagtagaaaaggggtttctccatgttggtgaggctggccttgaactcccgacctcaggtgatccacctgcctcagcctccaaaagtgctgggattatggttggagttaagctctttcaagatgaggttgggcacagtggctcatgcctgtaatcccagcactttgggaggccgaggtgggcagatcacctgaggtcgggagtttgagaccagcctgtctaacatggtgaaaccctatctctactaaaaatacacaaattagctgggcatggtggcgtgtgcctgtagtctcagctactcgggaggctgaggcaggagaattgcttgaacctaggaggcagaggttgcagtgagctgagattgcgccattgcactccagtctgggcgacagagcaagactccatctcaaaaaaaaaaaaaaagaaaagaaaaaagaaagaaagatgaggaaacatgaggctgggtgttgtctgagtcatccatagtgacattagagtttaccaagatgatgatgaaacaggaaccaagttccaaagcccctaatacaaatgagactcactgaaaagttggtagaaggcagagaacttaaaagttagtaaataataaaaccagatgacatgtgctttcagtgagaaaggggtttttagtcgggtgcaatggctcatgcctgtaatcccagcactttgggaggccgaggtgggtggatcacttggggtcaggagtttgagaccagcctggccaacatagtgaaagcttatctctactaaaaatacaaaaattagccagtcatggtggcgggcacctgtaatcccagctacttgggaggctgaggcaggaggatcgcttgaatctgagaggtggaggctgcagtgaggtgagatcgtaccactgcactccagcctgggtgtaatcccagctactcgggaggctgaggcaggagaatcacttgaatctgggaggtggaggttgcagtaaggtgagatcatgccactgcattccagcctgggtgaaaaaaaagaaaaaaaggtgattttttttttttcttttttatgaaggtggagaagaaatagcctccaagtagcaagaaaacactagaaaaaatgttccccttccaacgccaatgccataggggtatggaactagggagaggactgtaggagttgtgatgtcctcagagagactagaggtcagtgacgcacaccgtaaagatgttaaaagaggttgacagtggggcatagttccaggtgacaccaccatatgtagagctggaaggaaagtcagaaaaggagagatgagtcacaagcagtaggggtggaggcatggaagcaccagcatacaacaatctgaaggtgaaatcctgagacactggagggacttgctcaaggcccaataagccatctgagagcctcacagttgcaaagggaaagacctcgcaaggttacctccgcacccatgaggctcacatgggatgcggccacctttggctgagtgttcagttagtgagaatcccatccatttttccccttctcaatgtttccaagatccatttctttcttctccgcctcattgtcatgcctcaagcccagattaatgcagactgatcccagccgggctctgcagtgctaaactttgcccgtgatgatccctccagtctggaattttcaaactaatctttattaaataacctctttgcccatatccttctgttgctaataaacaaaataaacaggcccttttgtgagcagaaatgtcacagaagacatctaaaagtcccaacactttttatcctggtattttctctggaatgaattgtttatctccccacttccaaagctgacatcaaatgttttgccaactaagatttataatttaataacggtgtttcttgggttcatctcagttaagtctccaatatctatttcttactacaaaaagtcatcatcttgcgttgtcctgtacatttcaatgacagtctatacattgtttatatttaaaagaaatattcaatatgaacacttgtttccaaaaattttcttgcagaagtatcaaactacatcttcacttttagttcctctgaaactaaattttttttaagtatggatttttattatttctttttcgatttctccccttttgtctacttcaccttgctagaaaaatcacttaatgattccttcatggtattatacatttttatgatccttttatctaaagaatattatgtaatttctctacactttattggattgtgctaagagctaatgttctctatattagggtcatttctttgtgttgtttcccttgggcgtggagagcagctgaagcccactggtcttgcttcagtggtatggctgccacatttgtgtgtgtggtcattctcttaatccatctgcaacaccagcaacccttatatacatccaacagaaaattcacacctacacaactaaacagcttcatgtcttgcccctcttcactctaattcgtgcaaaatgatgagataactcttttctatgtgttgggaatgataggagaggaggttaatagggcataaagtacaggaagccagaactacctgaatcctgcccctactggccacacctcccagtaaagttccagagaagacacaatatttattcagaggacaaggcaagccacaaaggaccacacccatatgcttgctactctctcacccttctctcatcagcactccctagaatggtggacccatatctggtctgcagataagacacataaagaatagcatcagcaatcctacccctctttgggaattaagtgaagagggaagagtgaagtgattttggtctgaacaagtgcttcttttttttttgtttgttttggtttttgttttgttttgttttgagactgagtttcgctcttgttgcccaggctggagtgcaatggcgtgatctcgtctcactgcaacctccgcctcctgggttcaagtgattctcctgcctcagcctccctagtagctgggattacaggcacctcccaccacacccagctaattttttgtatttttagtaaagatgaggtttcactatgttggccaggctggtcttgaactcctgacctcaggtgatccacctgctgcctcagcctcccaaagtgctgggattacaggagtgagccagtggcgcaatctcggctcattgcaaggtccgcctcctgggttcacgccattctcctgcctcagcctcccgagtagctgggactacaggcgcccaccaccacgcccagctaattttttgtatttttagcagagatggggtttcactgtgttagccaggatggtctcgatctcctgacctggtgatccgctcgcctcggcctcccaaagtgctgggattacaggcatgagccactgcgcccggctcaagtgcttccttttatatgacaataaaaagctggaagaagtagccccctgtgaaggaaaagggtcagtatatgaggtttcggttatagatttgggcatgcccgtgtttgaggggtgatctgagcgtgtgcatttccttatgaacatcaaacatccatcattagacacaagaaataataatgacgcctccatcctccttttaggaagaaaacttggatacaccttcaacaatcagaactttcacaacgtgtctttggggcaaggacaggaagtggtggctgaggctgcgctggacctcgctgccaagaaaggtcactgggttattttgcaggtatgttcctctacccttgtctgggttatcttgacccatacttgcctcatcccacactcactgggcatctccatccactcttagcttctccccatctgtcctttcacactcttgtccccttcatttcttcatcttctctctttccagttctcctcactcatatgttctcttccccagaccacgtccaggaacaatccttctcccctcacctgctctgtcactctctctagtttaaatagctctacttataaaagaaacagattcccactctaataggcgttcaggaagttagcatttacgttgaaggccctggcagctggatgctttcaacagctggtttcttcctgtgaatttcatggcacgttcctctgctgtgcctttcttttgggctgtgtgtcatatgctcttcgtcacgggcatgactaggatatgggagcaaccttagcctcttcactgagagctcatgttggtgtttggaatctggaacccctactactgataatttgactgaacagttacaaggaaaaaaaggctacctctcttctatcagaaaagagagttaaattaaagaatttagccctctctattaacccctattaaattttatttaacccctattaaattatttcatttaaccaattttccaattttcgtttcaacaattactactaactctttttttttttttttttttttttttgagatggagtcttgctctgtcgcctaggctggagtgcaatggcgcaatctcaactcactgcaacctccgcctcccgggttcaagcgattctcctgcctcagcctcctgaggagctgggattacaggagcgtaccaccacgcccggctaatttttgtatttttagtagagacagggtttcaccatgttggccaggcttgtcttgaacttcagaactcaagtgatctacctgcgtcagcctcccaaagtgctgggattacaggcatgagccactgcgcccagcctaactactactaactcttacatagcatttcacagtagacaaaaccttttcaaatccatctctcagggccggcctgcctaatcctcttttatgccacttgtatacatgctggagttgtggcagaatgcatagcttgctcctcttttctcctagaacattttgaaatcttctattagagctccattgctacgttgacatggtttattttatgactgtattctccaccaaattttttaggtaaagagatgttccttctttaccttttatcacccagcccactgccttgaacatagcagacactgaaacaaaaggccggtgggtcaaggaatccatgaagaaattaaagaaagaataaatgcaaaagccagtcactcccattcttcccggctttcactaccatgaacctcccccatctcctgattactggtgacatcacatcttgctgctgggtctttgtccttaattattcagttatttatttggagcctagcaactgagagatctgcccctcccagggcctccttttccagaaacatcaggaagttcaggagaaaagataataacagctgagtttcctccttcctccctcatgggtcagcacagtgcttgaaggtatgacctccccaccccctcaggcacatttgccaagagacttctccggacgccagtgctgggaacccaggcacttgtcatggacatcagagtctgtttctgaaactgtggtgccgcctctgctgcccccgttgtcccccagcatctattggccatgcagggcatcaaaatcttgtgctgatgtggttgctcagagctctccaacactgaactcaatattccatctttatttcctggtgactggacatttccaaaggaaaattgtgccaaataatctggatgcctgcctttccccctgaataaagcattggagtattgaatagacgtaatctgtccacactgtaaagtgctcacagaaacaaaagatccttactggtttgtgaaatctcttgtaggaatcacagctatctggttctaagaatttcctgatgtactgaactagactggaccagaatcctacccagcaatgtttcccagcctgtaaacctgagagattctctgaaaaaaaaaaaaaaaaaaaaaaaaaaagctggggggggaggaatacacttaacaaattcctatttcaaatgttggaaaatactacatacaaattccttttaaggatattttcaatgatatcaataggctaatggttctgagaatcctttggtatagaaatcttattccatccagtatttcccaaattccgttgaacacaggccttctttttttttcttcaacttttattttaagttctggggtacatgtgcaggatgtgcaggtttgttccataggtaaacatatgccatggtggtttgctgtacagatcaacccatcacctaggtattaagcccagcatccattagctgttcttcctgatgctctccctctccccctattccacaacaggcctcagtgtgtttgttccccgccccgtgtgtccatgtgttctcattgttcagctcccacttataagtgagaacatgcagtgtttggttttctgttcccgctttagtttgctgagggtaacggcttccagctccattcatttccctgcaaaggacatgatctcgttcctttttatggctgcatagtattccatggtgtatatgtaccacattttctttatctagtctatcattgatgagcagttgggttgattccaagtctttgctattgtgaatagtgctgctgtgaacatatgcatgcatgtatctttataataaaatgatttatattcctttgggcttatacccagtaataggattggtggatcaaatggtatttctgcttctgtatctttgaggaattgctacactgtcttccacaacggttgaactaatttacactcccaccaacagcataaaagggttcctttttctccaaaacctcaccagcatctgttgtttcttgactttttaataatcggcattctgactggcgtgagatggtatctcattgtggttctgatttgcatttctctaatgatcaacgatgttgagcttcttttcatatgtttgttggccacaatgaatatcttcttttgagaagtgtcagttcatgttctttgcccattttttaatgaggttgtttgtttttttgcttgtaaatttgtttaagttccttgtagactcaggatattagacttgtgtcaggtctaattgcaaaaattttctcccattccataagttgtcttttcactctgatgatagtttattttcctgggaagaagctctttagtttaatcagatcccacttgttaatttttgcttttgttgcaattgcttttagcatttttgtcataaaatctttgcccatgcctatgtcctgactgatattgctagattttcttctagggttcttatagttttggattttatgtttaagtctttaatctgtgttgagttaattttttataaggtataaggaaggagtctagtttcatttgtttgcatatggctagccagttctcccagcaccatttattaaatagggaatcctttcgccattgcttgtttttgtcaggtttgtcgaagatctgatggttgtaggtgtgcaggaacacagaccttctttatggatctaacatcttttaacatcccatggcacacttttgggaaatgctgcctgaggaccctgacccagatgaactagggcttctcttctgggagagctggcttctctggtcctgggtgagaaagcaaggctcacagtcttcccgctcttccttcctggctgtaggagctattgtgtggatttcccaacccaagcccatcaaccctgtggggcagcctcgaggatctctgaatccaccccagggttctatacacaagcaacagacattccttctcctagacctgcccagtagcagaacttggagtttctaaaggagcagccaaattacccacatgtaggttgctggtgatgctggctaaaagaaaccctggctctcaagtagcccactaaacactctgctccaattgatttgattataagtaaattatttaatttcaccaattttcatctcaacaactactactatcccttacatagcattttacagtatacaaaatcctttatttatttatttatttatttatttatttattcattcattcatttatttatttattttgtagagatggggtttcaccatgttggccaggctggtattgaactcctggcctcaagcaatccacccgccttggcctcccaaagtgctgggattacatatgtgagccactgcacccagtcctacaaaaccctttcaaatccatttctttggttatctgcagccactctgaaataagtatagcaaacgttattgttatttctcttcttatagaagagaaggcagcactcaaagaccaaattactgtggtccaagtgctgggctcagctctgatctgtgtatttaaggctttgcatgcttacttcctcaaatatttatcaaggagcttttatctatccattataatgaaacacattgcaatgaagccgggtgactccccttactacagtgaaaggtgcattctgcaaagcactggtaagaaacaaatgtaggttttgatagatagacagacagcaatcaaacgttgggaggaggagacaggctcaaagaccagacagaggagcttgggattagagtagagagccttgtttggtctttgagcagcaatgactcagtgtgtttcaggaagataagtttggcaacaattaacagagtggtttggagagtggagagagaagactcaggaaagctagctagaaagagtttaaatcagtgcctttcaaatgttaacgtatgtaccaattaccggaggatctcattaaaaggcgctgattcagtaagtttgggcaggaccttagattctgcatttctaactagctcccaggtactgccaacaatgttgatccatgagctccaatttgtaccatcaaggtttcaaataatctagctgtcaggtaatggggagttagacttggaagatgaccaagtgttacagccttttttttttttttttttttttttatttgagacggagtctcactctgtcgcccaagctggagtgcagtggcgtgatcttggctcactgcaagctccgactcccgggttcatgtcattctcctccctcagcctcctgagtagctgggactacaggcgcccaccaccatgcccagctaattttttgtatttttagtagagacggggtttcaccgtgttagccaggatggtctcgatctcctgacctcgtgatccgcctgcctcagcctcccaaagtgctgggattacaggtgttagccaccgtgcctggccgtgttacactcttaaattgtggtctccagaccagtagcatctgcatcaccagggagcttgttagaaatgcacattctcaggccccatcctggacctgctgaatctgaaactctgggctggggcacaagaatctgtattttaagaagcccttcaggttattcccatgcacaggcaagtttaaaaacattatgctggaaagccttaggatagcaagagataagagtttaactgcagaatactgggaggtcctcactactgggcatcccagaactcttttctatgatgtgatttaagacacttctgccattaaaagtcattgagttgcacaacatgtgagtgcacgtaacgccattaactgtccacttaaaaagggtttcagatggtaaattttctgttacgtcttaccacaatttttaaaaattatgtgatgctaagaccagtcccccctctggctgccttcctgacaactatttactgctaacagagctaagcagatgcctgtattgagggggggctccttccttcccactagaacattcacctggtggccaagtggctcagcaccctggagaagaagctggaggagcacagtgagaacagccacccagagttcagggtcttcatgagtgcagagccagcaccctcccctgagggccacatcatcccccagggcatcctggagaactccattaagatcaccaatgagccccccacgggcatgcatgccaacctgcacaaggccctggacaacttcactcaggtacggccccgggagggaggcaaaaacagcagcacacctcacagtcagctgatgcaaactggtggggggagagcatgcaactcagaagggagtcgggtgctggttgggctacggagcaatgctgatgtgggtaaaatgttcccacctgatgcccactcagggcaaccccactctccattgccagataaccccaggggagtagagctcaggacatttctttggcaagagatgtggggaagccttctgcaagtttactgttacctaatattccaagatgaagaagggcacgttgttatacatctcattgataagatacactgggtcacacactgatgggctatcttcaggcagagagatgatactgtcaatcagatgatatcacttgacgtctacatgaatcttgagtatcaagggttcaaagaatccaggtgttaggtagtggggatatggatttgaaatgtaactgcatgttagaccccctaaagtatggcccctggaccagcagcatcagcatcacctggaaacttgttagaaatgcagatttttctgtcgtcccagctacctgggaggctgaggcaagagaatggcgtgaacctgggaggcggagcttgcagtgagccgagattgtgccactgcactccagcctgggcgacagagtgagactccatctccaaaaaaaaaaaaaaaaattgcagatttttaggccccaatctgaaactctgggctggggcccaggaatctgttttaatgaaccctccaggagattcttatacacagtcaagtttgagaatactgtgctccagagagactcagaatatcaagtgttcaaatgcagaccactacgtttccattatggggaatttcaaggcttatgttgtagcgtatttatttgaagccaggtccaagcccgtggtggccaactttgtatatgaagttgtactgtcaaagtctgcggcccaggcctctttgatcttctcaagaaggcactatttctttttggttctctcttgggagttccacctccctgggcaggagagtacccaaaggcctgaattgtagcagagtggaggccatcggatcaccttaaaatccatctgccacaccacgcctgggtggaattcaaggagagggttccagcagctgctagggaggttttcttcttggttgtcatcttgtcatagtaccagtgcatctcaggtttcccagaagccctgccagctcacatgtgtcagatgggtcatgcaggttatttgagatgggccatccaacaggatgactgtgccacctaaaccaacataaacctttggggtctggtttaagcctaaagtaagatgaagaccatgtaacagtcagagtctcagaagattttactgactgtgtgacacccttgtagtgtaggagtccagcagcccaactctgggcgggaagcttccacaaagattcaaggagcaaaacacattcagtaccccctgtactctttttcccagcttaactcccaggcagtgattacacctgctaaggttccacaacaggcaagaaaagcatggtaggaagggaagatattagagatggtgccatggcatgtgcacccacaccccacaccccggtacataacattcttattgcatgtcaccctgatccccatcagctacattagtgaactttattagcacatccgtatgcataaacttgaaccctaaaccaaaccctattatcacctgaatctaaaccttaattcaatgctcagctaacctgacccttccacacgttccccccaggctgtagtctcgctgtaactcaaacccaaaccagaatatatggtaatgttttccaacacgaaccctgattgtaacctcaccctagccagccccgtataagagaagttgtgtgcgaaccttaaaagcgacactctcatttcaggacactctggagatgtgttctcgggagacggagtttaagagcatcctctttgctctttgttacttccatgcggtggtggcagaaagacgaaaatttgggccccagggatggaatcgctcatacccctttaacactggagacctcactatctctgtgaatgtcctctacaacttcctggaggccaacgcaaaggtaaaggccatggacattcagggaccagccaggttgggagagggttaaaattatttaattttgaggggtgaatcagaggggtctaggatggggcctgagaatgtgcatttctaacaagctccctcgtgatgcagatgctgctgattcggggaccataatttaagagtgtaacacatggtcatgttccaagccccactccccattacctgacagccagattatttgaaaccttgatagtacaaatcggagcccatgcatcaacatcattggcaggacctgggagctagttagaaatgcagaatctcaggtcccacccaaacttactgaatcagcgcattttaacgagattctctggtaattcgtatgcacgttaaggagggatgatgcagtgctatcctacagaaggggcatgagcacacagaagggctgcaccccacacaggtgggatgaggcagtgccaaccccaggactaacccaaaggctgagaatagtacaactgtgaggtgagagccatggacgctcaggaagtctaactagagactcacacagtgagtcagtcccatgagagtttgtcccgggccccaccagaccatacctatgtcttcacagcatggcaggtagactgtgatcagcaggaagagacttcacactcgcctgatataagttcccaaacttcgctaacaatcagtgctcttccagttaagggaatattcacctcgtcaaggttattctagttcaggagccaaacacagagtcaacagggccaccacctcttcctcgtggggaaaacgaaccaggcccagatgccctgagaaatccttctgtctccagcccttgggcctgggaagcccactcaacagtaatctttcattgctggctttcctccagtgacctccctccctaagtctcacaccaatgaacttgtgggctttgtttattccctttgaactttcaaaggggacagttaatcttgtcattaaaggcagaaaattagaaaagtactctggtcctcacttttctccatttgacattcacctatttaaagaatttctaggtagagcctgccttcactgtcacagttaaaaagcttgaaagagggaaggcatatatatatggggcgtggggttggcaactttcctgtcttcactctttgatgtaattcttcaagcttttttttttcttctttttttttgagatggagtttcgctcttgttgcccaggctggagtgcaatggcatgacctcagctcaccacaacctccgcctcccgggttcaagagattctcctgtctcagcctcccgagtagctgggattacaggcatgcaccaccacacccagctaattttgtatttttagtagcgatggggtttctccatgttggtcaggctggtcttgaactcccaatctcaggtgatccacccgcctcggcctcccaaagtgctggaattacaggcgtgagccaccgcgcccggccttcttcaggcttttaatgaactccccaaacacccctaaccctgctgggcactgagggtatggagaaaaataagacattgctctcaatctcaagaagcgtccctctcttgtggctttctgtgctgcccagatgggaggccagccccgacgcctgtgtggaggtctttcttccttcctctctttctttcccccatcactcaggtcccctatgatgatttgcgctacctgtttggagagatcatgtatggaggccatatcacagatgactgggacagaagactctgcagaacctacctgggggaattcattcgaccagaaatgttagaaggagaactgtctttggccccagggttcccactcccaggcaacatggactacaatggttatcatcaggtgagactctgctctgtgcttctgatgtcgtgagggtgctcacagggccctgggtattcctcccacgccgacctgcaccaccagggaagcctctgctgggacatcaccatgggctgcaggcaggggctgaggcaaaagggcttagacagctgagctcatgtcaaatctggtcctatgccccaagcctgccctgtttaagttgagagatacgggatttctagcctcaaattaataatcaaatggagcctttggagatctttcgattcttgatgattggttcagtcattctgtgtgttgctgttttctacaaataacatctgggacagttatttggttgttttcacttgggatgttgacaaacccattttttttttttttttttttttttttttgagatggagtcttgctctggcgcccaggctggagtgcagtggcgctatctctgctcactgcaagctccgcctcccgggttcacgccattctcctgcctcagcctcccgagtagctgggactacaggcgcccgccaccaagcccggctaattttatttttgtattttttttagtagagacggggtttcaccctgttagccaggatggtcttgatctcctgacctcgtgatccgcccacctgggcctcccaaagtgctgggattacaggcgtgagccgccgcgcctggcctgacaaagccgtttttcatggagcaaaatttcaggcaagaccttagccaacttttggtaaagtttctgtgggtgattctaaatatccctggaggagcatggtcttgtgccaagatcactcaggtcactcacccctcccactccgtgttggtggctatgaacacaggcacataccgcatacgtatgccacagtcagcattctcatgaaggctttcttttcttttcttttatgagacggagtcttgatctgtcacccaggctggaatacagtggtgcgatcttggctcactgcaacctccgcctcccaggttcaagctattctccctgcctcagcctcctgagtagctgggattacaggcccccaccaccacacccggtttttgtattttttagtggagacggggtttcatcgtgttggcgaagctggtctcgaactcctaacctcaggtgatccacctgcctcggcctcccaaagtgctgggattacaggtgtgagccagcacgcccggcctcatggaggttttcttactattacttcggtcttttatgttactattaccacagctatgtttaaagtattcatctttgcctatttcaccttccatggaaaacattccaaaagattttttttttttttttttataagacggagtctcactctgtcacccaggctggagtggaatagcgcgatctcggctcactgcaacctccgcctccctggttcaagtgattctcctgcctcagcctcctgagtagctgggattacaggcgtgcgtcaccacgcccagctaatttttgtatttttagtagagacggggtttcatcatgttggtcaggctggtctcgaactcctgacctcatgatcctcccacctcagcctcccaaagtgctgggattacaggcgtgagccaccgcgcccggcccgaaagatattttttagcagtttttattggtaggcttttgaacatgcctagaaaaactcttgaatataaaacataagggaaatattgatcacaggaatattaactgcaagctttaaaaaaatttctttaattcattaaacttaagggtaaatcgtaaaagtcatttgatccagaaaaattggacctataagaggagatttaaaacaataaagctctttaaggaaaataagaggaaatgtttttaactacttcaccaaaggcaaaaaggcttttcccgggaaaattgtgcaacagcgtcccctagtgtccatgggataattcgacaggaggctggagcaagtaacaggcaaaggaagtctgtttttcttattcagcaagggtgaaatcgatttgcacatttccaaatgactgaggtacactctctttcttatacttctctttaatgtgttagttaatagatggttctagggcatctacatagagtccaggcctgcacagaacgctggaggaaatacaaaaatgaacatacagatcggcccttgaggaatgggcaatctattaggctaggtgttaataacaccaaggaatcgtcaaaatcatatcaggaacggaacttgagggatattttcccaccatcgtataaagagccatgaagaggcgctcaaaacattcagagccaggcgcggtggctcccgcctgtaatcccagaactttggaaagtcaaggctggaggatcacttgagctgatgagttagagaccagcccaggcaacatagtgagacctcatctctacaaaaaatagaaataaaaaatcggcttgagcatggtggcatgtacctgtatttccagctacttgggagactgaggtggaaagcacttgagcctgggaggtggaggctttagtgagctgtgtactctactgtacactactgtactctagttttttcagcagagtgagagcctgtctcacacacacacaataaaataaaataaaataaaactgagccttagccgctggttaggatttttaggcattaggcatggcagactctagccactagcactggccacagaaaggagctgctagggtgacacatagtttcaaaattttttttatttgaatacctttcaccaggggcgcaaactctccagttcgcagccaatctcacctccttcgtcctaagcccaattcacttgtttattttgcatgtgccatcccatgtacatgttcaggtttgtcatatctgatttagatggaggggagagaaaagaaggaaaggtctggaatcctagaagagcttacgtaaaatcactagggagggattcgtatttttgaaagactatgagaagtcctcctctggtctgcaggaaaaagagtcatcagggaggagtgggaggcattgggtgtggagatagataaagtcatctaagcctcccagaaaaaagagaatgatagaatgaatgtggaagttttgggaaacgggtccagccgacaaaaatggatgatgtcaaggtgcactaataggtggagagggtgatgaagtcaaccagggatggtgagcagtgtcccctggaggagggatactagcccatggactccctgcagaggacaagccggtgtgggagatgggaggtacgtcctggtttctttttaagtgagcttgcccttgattttcagtacatcgatgctgagctgcccccagaatccccctacctctatggcctccacccgaacgcagagattggcttcctgacccaaacctcagaaaagctcttccgcactgtgctggagctgcagcctcgggacagccaggccagagacggagcgggcgccacaagagaagaaaaggtgtgtgtggtggggactgcctgaggtcgttctgggggaccccgaggatcatagatgcacacctttctcctgctggccattttggcagtacacagcatagacaacacacaaagcaccaaccacctgcagcctggagatgcttgcctgtcaccgccaagagcctctcccctcccgtcatcaccatgctggccatcagttaaatcataggaagtccctgccattgggttcagcagttttctttgccagtccacccaaagtccatttttattcagcttctctgccaaagtgaagaaagggcagggctgaacagtggtggcttgggaaccttgaatgtgacttcttgatcccctggcaaaccaagcaaggatgggtaaggggttgcccctgagcacccccacctcagttcaccaaccagatgccagtggggaagaacacagtccttcataatgcaaacgccttcccttcgtgtgaatggcttctagtccgagagtctctaaatacacagttacctgccactaagcacaggacttcctgaaattttaggaaggtggaagggaattatggagtagaaaggcagaccagggtgaggtgtgggtttcaggacaacccaaggcaacatgggggctctgatcctggtgtgggggtagctgaagataaagaaagaatgggcctcacacctgtaatcccagcactttgggaggccaaggcgggcagatcatgaggtcatgagttcgagaccagcctggccaacatggtgaaaccccatctctactaaaaaatacaaaaattagccgggtgtggtggtgggcgcctgtaatcccagctactcgggagactgaggcaggagaattgcttgaacctgggaggtggaggttgcagtgagccaagaccgtgccactgcactccagcctggtgacagagcaagactgtctccaaaaaaaaaaaaacaaaaaaagaatgggccaccaaagggaaatttctccatgaatttttttctgagacaagctaaccaacttcctaaagatgtatttgtaccaactgacatccaccccatggtactgcctggattttttttttaatttaatttttctaagagtaagatttcactccatcacccaggctggagagttcagtggcataatcacagctcactacagcctgcaactcctaacctcaagcaatccttccacctcagcctcctgagtagctaggactgcaggtgtgtaccaccacgccctgctaattttttaactttttgtagagacagggtcgcactatgttgcctaggctagtcttgaactcctgggctgaagcaatcctctcattttgacctcccaaagtgctaggattataggtgtgagccactgcacccggtcctagctgggttctttaatttagagatgccattaggtttacaagtaaacatccttgggaagattatcaaacttttagcctctagagactgattttaggaaagcaaactgatactaaaagagttggacttttatataaaggtatggagtcatgtcatcaaaatagtatttctcaaattttaatatgcctaagaatgtgccagagagattgaaattctgactccgaggtctggggttaggttgcattggcaacctagtgattttgatgaggtgagcatacttcgagaaagctgctccatatcactctactcagtctattccactatttgatgtataatttgaaaataaagagaagaacccacccagaatgaataatgttcctagatctaaaactggaaaaggctgagactgtataagtaatagacttagaattcttcagtcaaggttcaaagaaggttctaatgcttatcatttccttatcccctcccccagctaacccaagaaatggggtgtgtatgtgcttgtgtatttcagaaatgatatgaactgtgatcacttgccatgcacaatgctgtgtgggacacgtgtgcaggttactgggtgcacatctgattgtgcagtatcccagtatttggccatggtggtgtttctcacatagctcacatgttcctatgagctatcttccttcctgtccacaccgcaggtcagctcaagatgaggggcaaagagtcaaagcccagagagtattttgttgttaagaagtaaatgaccgagaggttgtacactccacatacactcatgaactcttgactcaattctgttcccatgtttacatctatatgaagggaagctggggattttagtatatagctaaagagaaggagtgagaagggaggttggcatgttagatacatggatggatggatggatggatggatggatggatggatgatgggtagatgggtgatgatggatagataattgatggatgaatggatggatggatgggtgatgggtagatgggtgatggatggatagtgggtggatggacggatgatagaggaatagagttatgtacactgaagggcatctgcaggaatatataccaaaaaaccaatagttgaacagtgtttttctcccacagggggaagagttaagactataggaggactttgcttctaatatcatgtgtatcagaaatgtttagatttttctgataagcatttattacttttccagaaaggaagaaagcagaagtgtttgtctgtggaaataaggtggactccgtcccttggaacccactcctcctatctgaaagagtctctgggttccctgagcaaaagaggggccccgcatacgtctgtggacctgggtccttccctatcagccctctccctcctcaggcccccacaccctttacagcctaatcagagatgaaccagaactctgtgtccccacgtcctgtgtattttggaacaatacctccagacgatcttttcgtctctttgtaaataatgtccaaatggaagctcgctgatatagagctgttttttcaaactctgctccagagaaaaatatatatataattttagccatttgtcttctaccccagcagctgctctcaggtaccattaaaatccgattccagtttttgctatgacagcaccaaagacccattcgtgacagagtgattggtttttactttcttttttctaacatcagctcttttcctggagatggcattgtgtgttaacaatacaaggcaaggtgaatatttatcatcctttacacttatatagttcttcatagctttcagagactgccacactcatcagctcatttgatttgatcttcacatcaactctgggagttgggaaaggggacaagtggagaaaaagacactcttggaagtgtttacagctggagaaaattgaggcctaagtaacttgcttatgttcacatgggtaatgcagggcagaactgtattaactcggtcaggcctccttggctgcaagctatagacaccaacagagcttaactaggcaagaaatggctcactctatcaagggagtcagcctaagaagagataaaaaatcacgatggctctagagtcccaggtaaaagaagggtagactgccctttccaggcgcccccatcctgccagtggttccttggattccaggcttgagattcaaatcattgtgctcctgggaaacataatctgattggcctaacttggctcaggggaaactgggcccagtgactaaacataaacataaaacaatggggaagacatagtttcacaaaggagatagggaattgttcctagaagggaaaagagataatgaacagacaaaaacagatatccaccacaggcacctagagctcagctctcaggactccagaaatggctggcgctcgctcactccctccctccttcccctctctccctctgtcccaacctgctggctgtgtggtctattatgtctgcacttttcatttttctttctctgctgacagacctcctgggcttactcatttattccaaaatggcagactcaacctccaagtgcttgccccaaattaactcagaatctctgagcctcaattccagttttccaggagagagaccctacttgtcctagctcccctgatctaattagctgacagtttgtgtggggaaaagaatcgtggggtacaacaggaggtttacatgatagatgagggtgtttcttccagaactcaaggatagaaactgcagtgttgcatcatagaaactcagaactgagtggatgaccggatagatagatagatagatagatagatagatagatagatagatagtgatagattagatagatggatagatgaatgacagattagatagatgatagatagatagatattgtatataactgtatattgatatactgtatctggatatagatagatattgtatataactgtatattgatatactgtatctggatatagatagatagatttgtcattgctgctcatcacttcagcttcacatggcccacaggggccaccttttggcccaagtctgtcttatggctttctagtttgattcccacagccaactggatcagcctctgagtttttcaactccaaattcttagagagctatctgtgttcatcttattatgctaggcatgcaagtcccaggaacttggccagcctatgaagaggtcctactgtggtcagtcagtcctcagccctgacctagttgacctcgacaagcaggcaagagtttggccatgtcagtgggtggaggggcagcagacgatgggtgattggcatctctagtcccacactgcaggaaaatggattccttctggagaatagagccctttcttaacgctgtgtttccttctgtggggcaggtcaaggcacttctggaagaaatattggagcgggtgacagacgagtttaacatcccagaactgatggccaaagtggaggagcgcaccccttacattgtagttgccttccaggagtgtggccggatgaatatcctcaccagagagattcagcgctcactgagggagctggagctcggcttaaaggtgagcgcggtcttgtaaggcatggaggggacattgctagaggacacagatggacccctatggggaagaaggagcactgggggacctgaaagctggggagcagttgtcctgcagcatcctaggtgcccaaaagtcatcactccccagaaaccacagcctggccatgaggttgtctacaagaaccaagatgttatacagtctttgacatttctcgtcaacaaggaaagagtctacaatttctactaccagttacttaaacaagtttattttcctcaccttgagatgatgtaaagtgcctagcacagagcctgttaattactgttcactccgatgacaggaaatggaagctcttgctgcctttgaggagctgaggaaggtgactgctgtcgatttacattggcttgttttttctttttttttttttttttgagacagagtcttgctctgtcgcccaggctggagtgcagtggtgtgatctcggctcactgcaagctccacctcctgggttcacgccattctcctgcctcagcctcccgagtagctgggactacaggtgcccgccaccacgccggctaattttttgtatttttaggagagatggggtttcaccgtgttagccaggatggtctccatctcctgacctcataatccacccgcctcagcctcccaaagtgctgggattataggtgtgagccactgcacctggcctacactggcttgtttattaaaagaattgtaaatgaacactcagacaagccctggaagtccaggtatggaacatgctggtgccttcatcatgtctgtctcttggggttaaacacctagggtcacacgtggataggaaaaacacatatgagttttttcacatggagtcacatagatgatgaaacggactgcaaaatctaggttagggccgggcgcggtggctcgtgcctgtaatcccagcactttgggagcccaaggcgggcggatcacaaggtcaggagatcgagaccaccctggctagcacggtgaaaccccgtctctactaaaaatgcagaaattagccaggcgtggcggtgtgcacctgtagtcccagttgctggggaggctgaggcaggagaatagcgtgaacctgggaggcggagcttgcagtgagccgagatcgcaccgctgcactccagcctgggtgacagagcaagactccgtctcaaaaaaaacaaaaacaaaaaaatcaaggttagggttttttttgtttaatctcttaatgttctttctccttcctccaccgcacctcaacatgggtagaaggaaataaggaaggagagacaggaggggaatgttgaagatggacaatgtttggtaacgtttccaaattctgtgccagcttgtaatcaaatgaagtacaaaatttcacagagtaaataagaactttgcctgttatgtaatgcagttccattactgagtacgcaggtatatatcagtaactatcttgagtaggtttgctgccatttgaaaggcttatggaacttgggtaatgtggcacagcctgtttacccattcgacttccaattcattcactcatttttctttcgagagcctttgctgcagttggtgtcatgaatctcggagcttgcctgggcaaagatgcagggtgtgagaggtagttgtcttttctttcagtctgattcaagcaatgttgattgatgagcctcttgggcaagtctcagcactgcctgctggagggtgcagaggagattggaaagggagccttcccttgcagaaggacagtcttgtggggaaacagacacacacactgatataaagcagggtgaaattaattaagagccacatagagagacgcgggagaagaaagaagaaacaagtattgtgtgtgggataaggaaagccccagggaagcagtggcattgagggggttctggaggaagggtagggttgtgacaggtgatcacaaaaggcaggggctcctagaggcacagggcagagcagcccacggtctgttctcagagttaacatggtttggctgcagctacaggcccactcaggtgagcaacagtgatagggtgaacttccaaaaggtgacaaaacaatgatagaaaagtagctgggacctttgtctactggtcccactgcgaaatggaagataaacagagaaatctccattcaaacttgctgtcatgaatcccagactctccttaggaccatcccccaagctggcctggtcctcagactctccagaagttttatcacatgttcccatctccacgctccagtcctaccaacctctaagggtggggcctggaagtccgtaatgtttcatcaccagccaggaaattcttatgatgactcaagtttgggaagcacagcatgaaggtaagaggcaaaagaaaaaagttagacagtggtatttgtggcaaaatgaaggtgcaaaggggatggcagcagagttcagagaagagagttttaagtctagggaatggataaagctgagctggccagaaatgagaacagcagggaaaagaggcaaaacaggtgacttggcaggaggggttcgcagagtggtctggcctgtgagtgagaggcggagggcctaagtggggcaagtccctgagatggagcagcgaggaatgtcagctccgagctcttcccagaacactggtggaaggcacgcttggctttgctgaccagcttacctggcagggggaaggggaagaggaaattctgcttgaggttttccttcctcactttcttagtttaacaatcactttatgctgggctcagtggctcatgcctgtaatcccagctctttgggaggccgaggcaggtggattgcttaaggtcaggagttcaagaccagcctggccaacatggcaaaaccccgtctctactaaaaatacaaaaataagccaggcgtggtggcgggcgcctgtaatcccagctactacggaggctgaagcaggagaatcgctttaacctgggatgctataacctgcagtgagccgacactgtgacactgcactccagcctgggtgacagagagagattccatctcaaaaaaaaaaaaaaaatcactttaaagttctgggactgttggagctaaacgatgggaatacacagacatacaaagtggaataaccaatattggaggtggcaaaaggtgggaaggaaggaggggggtgaggaatgaaaaattacttattgggtacagtgttcactattcaggtgacaagtgcactaaaagtgagaattgcactactatgcaatatacacatgtgagaaagctgcacttgtggccgggcgcagtggctcacgcctgtaatcccagcactttgggaggccgaggcagctggatcacgaggtcaggagatcaagaccatcctggctagcatggtgaaaccccgtctctactaaaaatacaaaaaaaaaaattagccgggcgtagtggtgggcacctggtagtctcagcactttgggaggccgaggtgggcggatcagttgaggtcaggagttggagacaagcctggccaacatggtgaaacctcatctctactaaaaaatacaaaaattagccaggcgtggtggcacgcacctgtaatcccagctacttgggaggctgaggcaggagaatagtttgaacccgggaggtggaggttgcagcgagctgagatcatgccactgcactccagtctgggtgacagagcaagagtccatctcaaaaaaaaaaaaaaaaaaaaaaagagccagattagatccccagtcagcaagccagactttaaacttgaacagcttcacatctttagaaacagattttgtctatcaggaggggcaatcaaccactgaagcatagacaaaaagcctgacaccatcacacgtttgaatgataaaaattacttcccggccaggtgtggtggctcacacctgtaatcccagcactttgggagggcaaggtgggtggatcacaaggtcaggagtttgagaccagcctggccaatatggtgaaaccctgtctctactaaaaatacaaaaaaaatagccaggcgtggtggcaggcacctgtagtcccagccactcgggaggctgaggcaggagaatggcgtgaacccgggaggcggagcttgcagtgagccaagatgccaccactgcactccagcctgggccacagagcaagactccatctcaaaaaaaaaaaaaaaaagaaaaagaaaaaaaaaatctgcacttgtaccctctaaatatataacggtattttaaaattgaaaaagaaaaaaaaatgcttgcaagccgaaaaataaaataaaatattccagggctgtttcaggttgagcatagggagacaggtctacccatgttagccaacacattaattggacaaacccaaatgctgtgcccagactgggcaccaaggttagaaaatgtctaatttttgaagtcattaagtcaacactgttagcattcatgaaaaagatattgttattcaccatacttcatatttggctggatgggaggccataatgtctacctaaaaagtattagctactgaaaagcacagcaatgaaagccttgaggactacaggagctcaaagcacacaaaagtggtaaaggaaggcatcatctgggggccacaaatatgttcccatagaaaggaattcttttgggaattcaccacagttagacatctgtctctcagcctcacaagatgaggaaccaggtcctgtgattatcccagagctgactggaaggggtattgactttcactaaccaaactcacaaaagcctgatgtaccaaatgcccaatggccaatttattctgtttcaataacaactaggcatcattttcaaaggggcatatactgacaacagactgcccagaaattatctccctatgtaggaaaactacagaagacaagttcttagacttttaatgcccaatacagtagccattaatgacaggtgcctactgagccttgaaatggaatagtccaaattgagatgtgctataagcttaaattacacaccacatttcaaagccataagaccaaaaactataaaatagtctagtaattttatatttattatatattgaaatgatgtttggtattttagatatattgagttaaataaaagttaaattcacctgtttggttttttacttttaaaatgtgaattccagaaaatttttaattacctatgtggctctcatatgtggtttgcattctatttcatttaggcagtgcatatcttagatggagccatggccagcccagaatctgggaggggctgggaactatttttttttttttttttttttttttttgagacagagtcttgctctgttgcccaggctggagtgcagtagtgcgatctcagctcactgcaacctctgtctcccgggttcaagcgattctcctgcctcagcctcccggctcccgccagcacgcccagctaattcttgtgtttctttagtagagacggggtttcaccttattgaccaggctggtctcaaactcctgaccttgtgatccacccacctcggcctcccaaagtgctgggattacaggtgtgagccaccacgcctggccaggaactgatttttatcattcaaacgtgtgatggcatcaggctttttttctatgcttcagtggttgattgcccctcctgattgacaaaatctgtttctaaagatgtgaagctgttcaagttttaaagtctggcttgctgactggggatctaatctggctctttttttttttttttttttttttgagacggagtctcactctgttgccaggctggagtgcagtgacacgatctcggctcactgcaagctccacctcttgggttcaagctattctcctgcctcagcctcccaagtagctggaattacaggtgcctgccaccgtgcccggctaatttttgtgttttttactagagatgaggtttcaccgtgttggccaggctggtctcgaacccctgacctcaagtgatccacccgcctcggcctcccaacgtgctgggattacaggcgtgagccaccgcacccggcctcctctggctctttattctgatgcactgtgtgttgacttgaatagttcaggtctggaagggtgggccgtgctatggccctttcatccccacccactgagcagctatcctggcctctatgcctttggccttccagtactctaccagaatacctgaatagaaaggctgctgccaacccagcctggaggccagcctggaaggagtgggacccttatcactttcacttcttcccatgtcctcagctcccagtgtcttaaacaaatgaaagctcctcgccaagaacatcttcatagggtagaaaaaacagagaggagctaagcctcaggacaggctacagcatggagcccctccaggagggaggacctgggtgctgctgccctgtcccctggccctctgtggactgaacgcccgctgcatgaccgtgagcccagggcaacagctgcttcagacacatcagagatcagaggcgcccttttcaaatggaagttcctggcctcattcccagaggtatgagtccttagtttggactacagcctacaaatccaagcttttaacaggctccctgacttaaaagaacgaagacctacaggaaaaatgaggttttcactctgtattatgccaaagaaagattatgaaagcatttattgatagggatgaatgaaagggttaaggtcacagccagatagccctcctatcctgaaaaggggccacccagcctgtagttctcccagagtttcattgcaatgccaaaaccgaggaagcaccttgtagaccctgaaatgcagcattttcttgagcgaagggtccagtgttttaagttttctctttgttgactcttgacctgtgagcaagtgtgaatattaatcgctgttaaacaggattcaggccagaggagtttaggaaactggttgaattaacataagtaggtgtctttgctgtagtatagcttgagactttttttttttttctttgagacggagttttgctcttgttgtccaggctggagtgcaatggcgcaatctcagctcaccgcaacctctacttcccaggttcaagcaattctcctgcctcaacctcctgagtagctgggattacaggcatgcgccagcatgcctggctaattttgtattttcagtagagagggggtttctccatgttggtcaggctggtctcaaactcccaacctcagctgaatcacctacctccaccacaaagtgctgggattacaggtgtgagccaccatgcccagccaatgattttttattttcttcttttcctaaatgactcctggttctcttctccagggctgtccctgcttcactgacaagctgagacagaacattctttggagttccatcacttgcacattcaattagtatgtgtaaaattattgtcagaatacattataatcttattataagcagatgtgggaaatttttaagaaagccaagttacacatattatgttcctctgctttcaaaatgatgttagatttctgaagggtgttaaaaattaagtattgcatatatttttaaatttattagaccttatttttagagtaactttaagttcacagcaaaattgcacagaaggtatggagatttcccatacacctgctgtcctcaaagacaaattatccttcctcgactctcaaattccccaccagagtggtacttttcttataactgatgaatctatactcatacatcattatcacccagagttcatagtttacattggggttcattctcagtgttagactttctatgggtttggacaaataaataatgacttgtatccaccattatagtatcataaaaagtagtttcactgccctaaaattcctttgtattggatatattttaaacttttttgttttcagagatggaatctttctctattgcccagattggagtgtggtggtgtgatcatggctcaagagatcttcccacctcagccacgtgcgtagctggaactacaggtgcacacaaccacacccgactaactttttatttttatttttgtagagatggggtctcactatgttgccaggctggtctccaactactggtgtgaaacgatcctcccgccttgacccaaagtgttggaattacaggcatgagccactgtgcctggctattttaaacttttttcaagcacattatctcttcttataacaaaacttacagaaacagtttttatgccttcacggttttcagaaatggcacatctctgtatgagggatggtaacacagagtgagctgttgacttagcccagggaaatgaccagaaacaaaggacttctgagtccagggttccatctgagttcatcttatctgcctcgctctggcccagtcctcaaagcacatcccaaacgaccaggacatttccatcacacttagtccagtgtaccgccagcagtccacaacctgacaccttaggagttctgctgagtcacgttatcgggtgactccagaatggggcctttattcccctatcaactcacaggacagacgacattcacatgtgcagtatctttccatagatgcacccaaatttcatacaaccccaaacaattttgtatagaagcaaattcagtagaactatattttgctgtattgtttgtaaaggcattttataaccatggaagttaattggccattgaaaacgtcttaaaatttttattctgaagggaaaaaatgaatgcagtatggcctgtttttttaaaaaatatctgttggactcatttcacttttgaagtgagtcatgactttttgacacatcttcttaaccacaggttggcaagcaagtagtgctattgtatgcacataaaaatttgtactaaaactggcatttgtagtttttaatgtaagccaggcatggtggctcacacctgtaatcctagcactttgggaggcccaagtgggtggatcacttgaggccaggagtttgagaccagcctagccaacatggcaaaatcccatctctactggaaatacaaaaattagctgggcatagtggctatgacaggaggactgcttgaggccaggagtttgtagaccagtctgggcaacatagtgagaccctatcttgagggaaaaaaaattaaaaattcggccgggtgtggtggctcacacctgtaatcccagcattttgggaggccaaggtaggtggattatgaggtcaggagcttaagaccagcctggacaagatggtgaaaccccgtctctactaaatatacaaaactcagccgggcttggtggcagctgcctgtaatcccagctactcgggaggctgaggcaggagaattgcttgaacctggaaggcagaggttgcagtgagctgagatcacaccactgcactctagcctgggtgacacagcaaaactccatctcaaaaaaaaaaaaaaaaattaattaaaaattcagttccttttttgcattagttacatttcatgtgttcagtagccacatgtgatcttattagcacagatacagaatgtctttgccatcacaggaagctctggtggatgatggtattttaggcaaaaaggctaggttttctgtctggtaatgtaaactattatgtatgtttttgccaaagctatattacttttttttttttttttttttgacagagtcttgctctgttgcccaggctggagttcagtggcatgatctttgcttactgcaacctctaccttctaggttcaagcaattcttgtgcctcagccatccaagtagctgggattacaggcatgcaccattacacccagctaattcttttttttttttttttttttttttttttggtagataccaggcctcactgtgtttcccaggctggtttcacactcccgggctcaaagtgctcctcctgccttggcttcccaaagtgctgagataataggcatgagccactgtgcccagctctcaatttttaattttataattttagttcacttgcatttaaatagccacatgtggctagtggctatcatatgagacactgtaaacctaaaatatatgtatttgggtcctgtaatgtaaggccaaggacaatggataaggatttgccttgtagctgtgtttgctaaagagactatcaggtagtttccccataaagcacaatacttcatcctgcccctaaaggtgaatttcagcccttctctcctaaaatggcctgtagcccttaaaggccatttttttttccattcacagcaatcacttttcccactgacctctctcctggttctcttctccagggctgtatgagtcaggtacagctgctgtaacaaaataccgtagacggtgtggcttaaacaacagatatttatttctcacagttgtggaggctcaaagtctaagctcaagcaccggcaaatttggtttctggtgagggctctctgctgggcttgtagagaggtgtctcctctctgtgtcctcaaatggcagggaggcagagccagaaaaggggaaagtgggagagagactgagagatttcttcctcttcttataaggcgaaagtcctatcagattagggcttcatccttatgacgtcacttaaccttaattacctccttaaagactctatttccaatacagtcacatggagggttggggcttcaacatatgaatttgccaggtacatggcccagtccgtagagggggttttctcacctgtccaccctgcagctgctgcccacagagaagttgctgcattagcctgacttaccgttggagcatgctgtacccagactcagtggttctaccagccaccaacccacagcccttttgtgctggtcaggcctcaagcggcatcaacctatgacatcagtggctttaccttgctttttcccctccttatcactctcattcacctgattctgattctcattcacaaatgggatgaagtgaagtggtatcaaagctactggacattgggagtatgtcctgttaatgggcataatccatcatgtttgttagaaaagaagtgctgacaaggccaggtgcggtggctcatgcctgtaatcccagcactttgggaggctgaggcgggcggatcacgaggtcaggagatcaagaccatcctggctaacgtggtgaaaccccgtctctactaaaaatacaaaaaaattagccaggcgtggtggcaggcgcctgtagagcttgcagtgagtggagatcgccactgcactccagcctgggccacagagagagactccagctcaaaaaaaaaaaaaaaaaaaatgtgatcaattgaaatgaagccagaaatgacagagacaatggaagacaaagatgttaaaacaactattataagtttgcaccatatattcaagaagctagaagaaaacaagagtataatgtagaacatgtaagatatttattaaaagacgcaaatggaatttatagagatgaaaaatacaatattgatatgaaaaaatgaacttcagaggattcacagctgagtaggcactgcaggagaaaagatcagtaaccatgaatacacagcaataaaaacatctagaataatgaaaaaaccaaaaaaagtaaacaaattactaggtcctgtaggataatatcaagtggtctaacatacatgtaattggtgtcccaaaaagtaaacaaattactaggtcctgtaggataatatcaagtggtctaacatacatgtaattggtgtcccaaaaggatggggttgttgatggggaaggggggggccaaaaaaactatttgaagaaataagggccacagttttgcaaatttgctgaaaaccacaaaacctataggtacaagaagctcaacaagccccatgcagaataagcctaatgaaaacattgtaaatacacctcataataaaactgctgaaaccagggataaagaaaaattttaaaagcagcaagaggagaaaaataaaaattatatttaaaggatcaaagaaaagaatgatggcagacttcttgtcagaagctgtgcaagccagaagaaagtggagaactatcattaaagtactaaaagaaaaaaactgtaaacttagaattctttgcccaggaaaaaatagctttcaaaaaagaaaactaagtaaagatgttttcagacaactgaaataattcatagccaacaagcctgtgggacaagaaatgttaaagaaatttcttagaacccaggaggcggaggttgtggtgagccgagatcacaccactgcactccagcctgggcaacacggcaagacttcgtcttaaaaaaaaaaaaaaaaaaagagagagaaagaaatttcttagaaagaaagaaaatgatatatggaaatttggatctaaacaaagaaataatggtctccacagatggtaaatatgtgagtaatatgaaagacatttttactcatccaaaatctttttttaaaaataatagactgtttaaaacaaaaataataaaaatttactgtgggctttaagcatatgtaaaaccaaaatacatgccaacaacagcatgaaaaatgagagaaatagaagcatattgtatatgattcttacagcatatgtggagtggtataattttgaagttagggtgtgatgagttagagacatgtattgtaaatcctacagcagcattcagcaaactgtcagccaacaggccaaatccagcccacaacctgttttggcaagtaaacattggaacacagccacagtcattcatatatacattgtctatggctatttttgtgctacaatagcagaattgagtagtgtcagcagagatcatatggcccacaaagcctgtaatatttatttactatttgacactttacaggaaaaaaaaaaaagtttgtcaattcttgccctagagcagccaaaaaataaataaataatctacaattatagtagttactgtattggtaactacattaaatataaacggcttaagtgcccagagtactgtttagaactgccagatccaatttttaaaaagcaagacctacctatatgctgttatgtcaggaatcctgtctccagaccactcctacatttggagatttgctagaaggactcatgagtttcagcatatgattgtattaatacatatggctaaaatttgttatggtgctgtagtaagaatacacacatagccagatcataagggaaaagacataggtggagtcaggagaaacccatgtacaggtttccatatgctgcctccctctcatgaaggatcacatagagtgcatcctctctccagcactggaaatggagtaacatttgtgtaacatttctgcccagggaattccattagagaccccagcacccaaggattttattaggagctggtcacataggcaccctctttctagcacatccaaaattccatgcttccaaatgggaagtaggtattcattgtaaaccaaattgtttgcacagtctggatatggtcaaccacccttttctattaaccgttaacgaggagctaagtttctagatgccagccacaggccaaccttgctagcaggcatttctaaggatagcagtctcaagcttgcccattaactctttcagcacagctgattaccaaaacaaaggacaaaaaaactacgtatccagctaaacacaggttagaagaaaaagatgagaaaaaatataatataaaaacactaatcaaaagaaagttgtagaggctatataaaaatcaaactaactatatttttaaataagcaatattaccatggatgaagaggagtattatataataagtcaatttttcaagaggatataacaatcctaagtgtataggcacctcataacaaagcgtcaaaatacataaagcaaaaaaatgatagaatcaaaagaagaaataaacaaatccataattatagttggtttcaaaactcctctctcaatatttagtagaacaagtagacagaaaactaattaggataaaaaagacttggcaaaattatcaaccaacttaaccaattttacagacactccaacaatgtcagaatacacatacttttcaagagtacacagaacactcaccaaaatcaactatattttatgtcataaagcaatatgagaggattaaaatcatacacagtatattaactgactatagcataattgaactaaaaatcaataacagaaagatatcagaaaacccacaagtatttggaaattaaatagcatatttctaaataattctaactatattgaataaaataaaaataaaaatatataaaattggtaacaattagctaaagcagaacttagagggaaatgtatagcatgagatgcgaatatcagcaatgaaaaaagttcccaaatcaattatctaagctgcaccttaagaaactaggaaaaaaatggcaaaacaaacccaaagtaaacaaaatgaaggaaataataaagagtagaattaatgaaagtgaaaacaaaaaaattataaaactttatgaaaccaaaagctggttctttttaaaaatgaataaaattaataaacatttaccagaatttataagaaaaaagaaaaaacaaaaacttgaaaaaatcaggatggaaggggagatatcatcataaatcctatagacattaaaaggattataagaatatgaataattttctgcaattaaattcaactacttaaatgaagtgaaccagttccctatgagactccatcaaagctcacccaagtaaaatgtataacctaaatagcccatatgtgtttaaaaaattgaattcatgacttaaaatttcccacaaagaaaacccctgatccacaaagtatccttggtaaattctacaacatttaaggattaaataataccaattttacataaactcttctacttccaggaagatggatagacttatgtttccctattcctcctgctaagtataaataaaaaccatggccattttatacagaagaaacataagactctggaatatgtagagaggaatgaagactatctatgaacctcaggacccaagaagggacatgatagtgagtttcttggattttctttatgcctcatagacctcagaatgggagaaaaaaaaaaaaaaagccagcaagccagaaataccagtggatgcagacaaaacaacaacaacaacaaaactgttctcttcagcagagagagatgaaccagcaaagagacagcctagcgagacagaaaacttacagacaataagcatgctacttcagccatacaccacagaaaaaacaggaatccttatcatgattgaaatgttttgtgtcttgactgtatcaatgtcagtatcttggttgtgatattgtactatagtttttcaagctattaccattaggggagaccaggtaaatggtacacaagatctgtctgtattattccttacaactataaatatacctataattatctcaaaatcgtaagtttaattttttaaatcaccatacaaaacctgcagatgtttataacagcattattcgtaactgccaaaacttggaagaaaccaagatgtacttcagtaggtaaatggataaactgcagtacatccagacagtggattattattcaatgctttttaaaaaatcagctatcaagccatgaaaagaaacagagggaacttaaacacatactactaagtgaaagatgtcaatatgaaaaggctacatactgtattattctaactatgtgacattctgaaaaatggaaaacaatggaggcagtaaaaacactggttgcccagagttaagagtgaggatggcatgagtaggtcaagcacagaaaaattttaggacactgaaacaataatgatgaatatgatactataatggtggatacttgtcatatactataatgatacaacatgatactgtatttgtacaatactgtaacggtggatacatacaattatactgcaatgacatatactaaaatggtggatacgtggcattaaactgtaatgatacaatatgatactgtaatggtagatacatgtcattataaatttgtccaaacacatagaatgtacaacgcaaagggcaaaccctacggtaaactacggactctgagtgataatgaggtgaatgcaggtgcatcacttgtaacaaaggtaccgctctggtggggaatgttgatagtggtggaggttgtgcatgtgtcgaggcagaagatataagggtaatctctgtacttgctgctcaatttgctgtgaaactaaaactgccctaaaaaaaaaaaaataaagtatattaagaaaaggcatagagaaaacttctcaacaaattttatgaaaacagaattaacgtgacaccaaatacgttatgagcaaatgacagatcagctttcctcataaacacaaatgcaaaattccttagcaaaatgttaacaaatcaaatcacacaatataagaataagataatatatcatggctaaatgcggtaatcctaggaatacaagattagttttaagattcaaaaatcagtcagtgaagtttaccatattaatgtgctacatttaaaaatcatatgatcatcttcataaatgcagagaaggcgtttgacaaaattgaacaccaaatcttcattttaaaatatcaaaaaaaaaacagaaatcaaaggaaatgtcaacttaaaggatatccaaagaaaacatatttaattgtgagggactgcctgctttctctctaagtttgggaacaaggcaaggttttccatcctcatcacttttgttcatcattgccatgaatgtccttcataacgtggtaagggaagacatggctacacagatggggtctcataaaacaaagtgaatgatcttctttgatcatttattttgtcctttgcactaaatttcatctttatacttaatgttattttattaaataatcagctatttaaagggaaacaattattacataagctatacattgcatgtagcaatgaattatcacataactacagatatgaggaagaccgtattgtctcagaagcttgatttgggctcagagatataagcagcatattaaacccatttctcagaagcctgtgtacactaaagcagagattccaaacaaaggaaacagtttttttctattttaacctaataatgatattcatttcagcagatccttagggaaatctaccagaaaaaacttgctcatcaaattcgggtttggttgaaagtgataaatgttggtggcacatacagggctcttttacatcccatggagccttgatgtggcctcagattcatcacaacaccctgctctggtcattcacctcaaaacatctggataaatacgtggaatgaaatctattttctatccctgtaataaagtcctgttacttgggggaaaatgtttgtaattcacactgtactcattcaggctggtccatctgttgctggtctgattagggatattggtcttttctttaaaacattgaggtttttatgtcttaaaatagtccggccaccagacactacagtctagaaagtgaattcgtaataattatacttcatgtaggaagttcataaagaagttaccagtttatttcttataaatcaggagcctctggctgtcactcaggagactgaaatatgttcatcttaaggtaggtatgcttaactgtttttaagaattccaaaagtgggccaggtgcagtggctcacgcctgtaatcccagcattttgggaggccaaggcgggtggatcacctgaggtcaggaatttgagaccagcatggccaacatggtgaaaccccgtctctactaaaaatacaaaaattagtcgggtgtggtggtgggcgcctgtaatcccagctacttgggaggctgaggcaggagaattccttgagctcgggaggcagaggttgccgtgagctgagatcgtgctactgcactccagcctgggtgacagagcaagactctgtcttaaaaaaaaaaaaaaaaaaaaaaaaaaatccaaaagtggctgggtgcggaggctcatgcctgtaatcccatcaattctggagattgaggtgggcagatcacctgaggtcagggtcaggagttcgagaccagcctggccaacatggtgaaaccccatctctactaaaaatacaaaattagctgggcatagtgacagatgcctgtaatcccagctactcaggaagctgaggcagaagaatcgcttgaacccgggaggcggaggttgcagtgagcagagattgcgcccctgcactcccgcctgggtgacagagcaagacaccgtctccagaaaaaaaaagaattccaaaagttaagagaaaaagttagatctagaattccatgtgccagtctcctgtcccacaggccaggagactccaggccctacggaggtgagaacatcttacattttagcagtctgcccttgatgagacagccaaacgctgtcaggtgccctaacacctattacagaaaccacaacaatagaaatggggtcttcaagaaattgccacagatcattggcagagccaaagttacaaagtttgctttaaacatagtgttcaggccgggcgcggtggctcatgcctgtaatcccagcactttgggaggctgaggtgggctgatcacttgaggtcaggagttcaagaccagccagaccaacatggtgaaaccctgtctctactgaaaatacaaaaattagccgggtgtggtggcaggtgcctgtaatcccagctactcaagagactgaggcagaagaatcacttgaacctgggaggcggaggttgcagtgagcagagattgcaccactgcactccagcctgggcaatagagtgagactccgtctccaaaaataaaaaaaaataaagatggtgttcagtgtaaacctttctttacaaatcctatctagctgttgaaagagtgtcccttaaagttgattacatatccaatagctcgatttctgaaagaaatccctgatttgggggaatatagatctttgtaggcgctggcttcttgggtttctaagctgcatgcaggagagtcatggaatttaagctttaggctaaggtcatgtggcactgaacccacaagtggtttaaggtctgcaatgggaagcaattgtgtcttttgaaacactgtgagtagaacagttgagactctgacatcagagcagggagggttttcaaggaccagcttctgtgagacaaaccttccaaagcaagtactagacaggacagtcattgtgtcacctacccctggagttttatgttcaaatgacatgaacaaggatggataactcttgtctgcctgggtgccatgagccaggggtctctgaggccaggtgttttcagggacttcccaccttctcacgctttccccctcccattctttatcttcagggggagctgactatgaccagccacatggagaacttacagaatgccctgtacttcgatatggtgccagagtcctgggctagacgagcctacccttccacagcaggcctggcagcctggtttccagacctcctcaacagaatcaaggagctagaggcttggacgggtgactttacaatgccctccactgtgtggctgacaggcttcttcaacccccagtcgttcctgactgccatcatgcagtccacggctcgcaagaatgagtggccactggaccagatggccctgcaatgtgacatgacgaagaagaacagagaagagtttaggagtcctcctcgggaaggggcctacatccatggcctcttcatggaaggtgcctgctgggacacacaggtaaagcttggaatgaaccaaagggcagctttctgggggctgattaaatacacattgcttcctatgaagtgtgactactaaaagagatattcctgaatctttttctctagctaaccttctttccttgaggccatcaggccatttttatttagccaggggtggtgcaaagagcgtaagttttgcagaggcagtagagtggagaggttaatagcaagggctttggaaccagactggctgggtctgaatcccagcaccaccatttattaactctgtaactttagatatagtttcacctttccagacctcacctgttagatgggagaagagcgtcattgtaaaagttaaacgagctaatatgtaagacacttgaacagtgcctggcacataggcagttatcaaaaaatgttggagtcagctatctctgctgctgctgctgtgtgtctgtcgcccaggctggagtacagtggcacgatcttagctcactgcaacctccgcctcccgagttcaagcaattctcctgcctcacctccttggtccactttccacattcatgagctctcaaagggcaggaatcttctgccttttatgttgtcctatgttggcaaagaggagccagtagatatcacttaaagtggcattttgaaaggattccttatcaaaggctaataaaaacgtgagtcacatgagattggagaagatgttttgtcaccaataagaatatgcaaatagagatttacttggttaagtagtgcccccaaaaattcatgtctaggcataaccccagaatgattatttagaaataaggtctttgcagatgtaattagttatgatgaggtcatactggattatcatgaaccctaaatccaatgaccagtgcccttataagaagacacacaggtcgggcacagtggctcacacctgtaatcccagcactttgggaggccgaggcgggcagatcacctgaggtcaggagtttgagaccagcctgaccaacatggagaaaccccatctctactaaaaatacaaaattagccgggcatggtggtgcatgcctgttatcccagctactcggaatgctgaagcaggagaatcgcttgaacccgggaggtggaggttgcagtgagccgagatcgcaccattgcattccagcctgggcaacaagagcaaaactccgtctcaaaaaaaaaaaaagaagacaacgaccacatagatgggcacagatatgggaacaatagacactggattattagagggtgtagggagaggtgggggttaataaaaactaactatccggtactatgctcactaactagatgaagggatccatactccaaacctcagcatcatacaatattcccatgtaacaaatctgcatatgtatcccctgtatctaagagttgaaattttttttaaaaaaaagaaactaaaaggaaaagagatggaaaattttgttgagacatgttttataatgcttaccattctagtggatatagcaagtaaagtctcatggagtatattagcagtaggaaatgtattcattcattccatataggcttgcagttaaacaaattacctcaaaaaaacaaaacaaagaagaccatgtagagacacagaagagaattccctatgaagacagaggcagaattggagtgatgtatctacaagccgaggaattccagggattaccagcaaccatcagaagctaggaaaggtatgggatggtttctgcttcagaacctccaggaggaccaactctgcccatactttgacttaggacttctggcctccagaactgtgagataatatgttgtttcaagccatcaagtttgtggcattttattatgccagccctaggaaagcaattcaagagccaacagaaaggacagtaaagtagggtaatgtttagaaagcctgaatcttgagaaggaagttgacttccctctctccacctgaacatttgcacaagattctgtcagtggagatcatatatggattgcattaggtataaggtggcctagagcaagccacagctattaatagaatcctccaaaccaccaaaatgagagaagtaccaaaaggaaagtaggcaagaagctcagaaggaaagtcagtgacactggaagtgggggaatgatatcagtttcaattgtcaacctcccatttttcatacctcattgtaaataataataaaaacttccccaaaatcaatacttcttcaccaaaagctgttgttctcaaaggttttatcccagaaagatgtcggcaaaaatggaagagtcaggacctcctaaaatcctctcctccataaaacaatgagaacattcacaaaaactgagtcagaatcaactttcttagaattctggaaattaaccaaaggctttcagcaatccaagaagtgtttactcaagcaaaacagctgaatctcagtaggaagaacagtctatggccttttaacttgtctattcccatctcaacccaacccctagcttggaggttacctataaaaccaacagaccacaatcacagtgaaaccagtagcctggaaaccactggaaggggcaaaatggggttggagcaccttcaaagccctgttccccacccccccacaaaaaaactgtcattattttgcctgtccagggattccctggactcacaagtctttatctcacctgagttggaactcacccagggcaacagtctttttccccagggcatttgttgaagacaatcaaagacaactgcttaacactgcagtttgtctgaagcagtagataatagtggtgcaaacagtaggctaatcaaaaagcttaaaagggcaagtcggagaatgagatggccatagggggctttgaaaacccctgacatgttcctggaaatctaggccatgcctatgtgcagatctgtgcacccatccacagctgtggacatgctcaagagagttgagaaggcagtacactctagctaaccttgaggttctaggaaaacaggggagtgaaatctaagcagagttttaaactgcctggctaagcactgaaggtgtgctccaacacttgcacacagccactcagccaagactttgtgacttattggttctaggcatttgagaaaatctgtccaattatttggtgacctctaagctaacagagcaggccacttcagtggccatacttgacaaagaatatagactttacagaatcagttcagaaaagtcactaaacaaaccctggcaagagagagaatatgatttgcagagtggccacattatttaaaatgtccaagttttcaacaaaaaaattatgatatacaaagaaacaaaaagcaatggcccatacacaaggaagaaagcaatcaacgcaaactattcctgagggggatcaaatattggacttgctagacaaagactttaaatcagctattttaaagatgttccaataaccaaaagaaaccatgtctaaataactaaagaaaattgtgtgaactatgtatcactgaatagagaatacagagagaaaaattatatatgtttttaaaaaaataaagtagaaactctggatttgaaaaatataatacctaaaatgaaaactcagtagaggaattcaatagcagaattgaataagcagaaaaatcagcaaatttagaatcagatcaattgaaattatcccgttagaagaaaaaaatgagaaaatgaagagtctcagagacctgtgggacaccatcaagcataacaacatatgcacaatggtagtttagaaaggaaaggagagataaagggacagaaagactatttgaagagataatgacccaaaactgcccaaatttgaagaaaaacattaatttacattaatttacatgtccaagaagctcagtgaaatccaagtagaacaaactcagagatccataccaagacatattatagtcaaactggtgaaagataaagaagaaaatcttgaaagcaacaaaagtggctcatcacttaacaaggggttctcaatgagagtaatagctgattgctcatcagaaaccatgaaagaggaaggcagtacgatggcatagtcaaaatgctgaaagaaaaagactatctgccaagaatcctacctgcagcaaaactctctttcaaaagtgaagaaagtgagacattctcagattttttaagagagagagacagagagagagagaattcatcactagtaaaccagccttataggaaatactaaagggagtccttcaggcaaaaggaaaggatactagacagaaactcaagtccacacaaagatatagaatattgacaaaggcaattacatatgtaagcataaaagatagtataaatgcatcatttgtaatttttatttctcttctatctaatttaaaggacaactgcataaggaaataattataaatctgtgttgatggatagaaatgtataaagatgtaatgtaaatgatgaaaacagcacaaaggagggagagggaatggagctatacaagattagcttttgtataccattgaaagtaagctggaattaggctgggcacagtggctcaagcctgtaatcccagcactttgggaggatgaggtggttggatcacttgaggtcaggagttcaagaccagcctggcccatatggcaaaattagccaggcatggtggcacacacctggagtcccagctactggggaggctaaggcaggagaattgcttgaacccaggaggcagaggttgcagtgagccgagatcatgccattgcactccagcctgggcaacagagtgagactccatctcaaaaaaaaaaaaaaaaaaaagtaagctggaattaatctgaaatagattgttatgtacattagaatattttttgttttttgttttttttaagactaggtgactaactttgccacccaggcgggagtgcagtggcatgaacagggctcactgcagcctcaacttcctgggctcaagcaatcctcttgcctcagttcccaagtagctgggactacaggcatgtgccaccatgcccggctaacttttttgaattttaatagagatgagttctccctatgttgcccaggctggcctccaactcctgagctcaagagatcttcctgccttggcctcccagggtgctgagattacaggtgtaaggcaccatgcccagtcttagaatggtaattgtaatccccaaggcaaccactaataatttaaaaaatagtaaacaagggaaattaaaatgatacactagcgtatatctggtaatacaagagaagacagtaatggagaactagagaaataaaaaagacatatagaaaacgaatagcagattctacttaatcagtgattacattaaatgtaaatggattaagcaatacaattttaaaaaggcagagattagctaaatgaattttaaaaaacaaaccatgaaacccatcatgatccaattatatcatttccacaaaagacacgttttagattggaagataccaataggttaaaagaaaacagatggaaacagatatgccatgcaaacagtaaccaaaaggcagctgagaggctatactgtatcagacaaaatagactttataaggtaaaaattgttactgaaaaataaataggatagaaattatagagacaaaaaaaggacattttatgagaataaaaagatcaacccatcaagaagatacaattgtaaatatgtatgcacctaacaaaagagcccccaaaatatacaaaacagaaactgacagaattaaaggaagaagtaaacaattcaaccataataattggagctgtcaatacatcctgttaatggtgactgctaatgatcatagagtttctttttggggagatgcaaatgttttagaattagacagtgataatgatcgtacaactttgtcaacacaccaaaaaccactaaattatacactttaaaaggattggttttacagtatgttggggaaaaaaaaagaggttctacctctgttcctattccttgccatacacattcatctctatggggcaaggaggtccccactgtttaccttaattctgttactcaccatcctttacctcatcagcctctaaaagaagtgaagagctacatccttccctttaaataaatttcacacaaataaaccaaactttgtccatggcataaaggcctcagagtcacatggacacaaagaatctgtgaaacactctgaatcagcatttcccaaagtatggtccataaggcactagtgctatgggaaatgaataggttgcaaagagaaaggtcctgtggtcaaataagtttgggaaacaccaggttaaataaactgttttctttattgctaggacttcttgtgttcagtgtggtagtgtatgttgtaaaacgtcaagtccagaatatggtaagcaccacttcccaaatttattggaccaagggagactttggctccgcagaacatttctcgggactagtaggaaaaattgctctgtacagctgtattgaaatagctcagaaaatcatagggaggcctcatctggaaagctacagaatactcaggtccacattacatgagtaaagatagaatgtagccctctccactctagaggatggaggaagttgcatatgaaatagaaaagaaacagaaacaggacataacaaaagctttaaaagctaaagcatttactggcagaaactgtgtcttagtcatttttaaatccccagcacctagcccgacatctggcaaatatacacattcgatatgctcatgaaatgaattaatgaaaaaacaaactaggagagaatcaagctccaaagggattcatttgtatatgataatagcttttggaactctgcttcacctgatttaggcagagaaaaatagaaacgtgtttctacatatcagatgcattccatcaaaggctgctgagaaaacctggaagggggcaggcataaaggcagccatgtcagtccagtctttcctcccttggatctgctgacaagagcaaggctggttggctgggctctgggtctgatctaaggtgcctcttctcatgttttatcctcaggctgggatcattacagaggcaaagctgaaggatctgacaccccctatgcctgtgatgttcatcaaggccattcctgcagataagcaggactgccgcagtgtctattcctgtcctgtgtacaagactagtcagcggggacccacctacgtgtggactttcaacctgaagactaaggaaaacccatccaagtgggttctggctggagtagccttgcttctccagatttagcatcctgcagagccaccgagaaaataaaaaagctgggcttggaggctgcctagagggacaggtgggtgaagggtcaccacagacacttagaacggtaagaaaccatgagcactcacaattctgtagaattcctctagggaacttggagaggtgtgcctaaggtgaggctgagctgaaggaatgtgggcccaggtttcttaataaaatgatttactcttcaactgtgtctggcccaggatttgagagctgctgaatcataaatgatcatgtagagaccaagagaaacaaaccacaagggccctgaccttgttacacaacactatcctaggtgctcttcttccaggctaccccacgcagtccttggaccagtggtattggcatcacccatgaaccagaatctccattttaacaatctctctggaaaatctgtatgcacattatagtttgagaaacactatcctggagcaggggtcaccaacatttttccataaagagccagttagtgaatacttttagtgatttacaggccacaatgcctctgtttgaactttgcaactttgccgtggtagaccaacagtaaccataaatgatgagtaaatgaaggggtgtgattgcattctaacaaattttatttacaaaaacaagcaatgggccatattttgctgatccctgctgtagaggataagggatgtgtatactgatatttatccttcattaattcatgcatccactcaatacattttaatctgacacctactatttgttgtggatacaatgtgaacaagcaaacaggaagtatctccatcatcctttcgatcatttaagaggaagccaagaagaaatctttactgtaaagccttttttttttttttgagatggagtctcgctctgtcacccagggtggagtgcactggggcaatctctgctcactgcaacctctacctcctgggttcaagcgattctcctgcctcagcctcccaactagctgggattacaggcgcctgccaacatgcctggctaatttttatatttttggtagagacagggttccaccatgttggtcaggctgatcttgaactcctgacctcaggtgatgtgcctgcctcagcctcccaaagtgctgggattacaggcgtgagccaccgcgcctggccattctaaagctttttaatctaaaagttttctagatttacctccgtggaacaaattttcactggaagtccaatgggtttaacagttttgatgagttttaaaaagctctatgaggcagcttgtttggtaagaaaagtatgggaggacccagtattccttctgtgattattccctcctaaccttgcagaaacttaattttgtgattactgttttgaacagtggttcttaaacttgaacaggcatcagaatcccctggagggcttgttaaaacaaagattactgggacccgcccttcaatatttctgattcagtaagtttaaacaaattgccaatgctgctggtctggaggccagtttgagaactcgtgatttaaaacctcaaatcccatcatcctataaatctctgctatatagaatatggaatctgatgctaattcctctatgattttcctgctttcttccttgcagttcctgcaccccctaagtggggccttctcatcttcatgatacaagggagttaataaattttactgctggaagccaggacctccagcttgggtgttgtccctcctctcccatcaactagtaatgcacttgcagtttcctgactataggttaatctgttttcagggagataactctgtccacattagcatcatccttcctgagcctcacccatagtagtataataacatcaggcaggccgggcacagcggctcatgcctgtaatcccagcaatttgggaggctgaggcaggcggatgacaaggtcaggagatcaagaccatcctggccaacatggtgaaaccccgtctctactaatacaaaaattagctgagtttggtggtgcgtgcctgtaatcccagctactcgggaggctgaggcaggagaattgcttgaaccagggagtcggaggttgcagtgagccgaaatcacgccactgcaccactgcattccagcctggcgacaaagcaagactctgtctcaccaaaaaaaaaaaaaaaaaaaaaaaatcaggcctaaagaaggaggtggaagatggtgggaggtggaagatggtgggagggggaagtctcactgtcaggcctctgagcccaagccaagccatcgcatctcctgtgacttgcacctatacgcccagatggcctgaagtaactgaagaatcacaaaagaagtgaaaaggccctgccccgccttaactgatgacattccaccattgtgatttgttcctgccccaacttaactgaatgattaaccctgggaatttccttctcctggctcagaagctcccccactgagcaccttgtgacccccgcccctgcccaccagagaacaaccccctttgactgtaattttccattaccttcccaaatcctataaaacggccccacccctatctccctttgctgactctcttttcggactcagcccacctgcacccaggtgaaataaacaaccatgttgctcacacaaagcctgtttggtggtctcttcacacggacgcacatgaaatttggtgccgtgactcggatcgggggacctcccttgggagatcaatcctccgtcctcctgctctttgctccatgagaaagatccacctacgacctcaggtcctcagactgatcagcccaagaaacatctcaccaatctcaaatccggtaagtggcctctttttactctcttctccaacctccctcactatccctcaacctctttctcctttcaatcttggcgccacacttcaatctctcccttctcttaatttcaattcctttcattttctggtagagacaaaggagacacgttttatccgtggacccaaaactccggcgccggtcacggactgggaaggcagccttcccttggtgtttaatcattgcagggacacctctctgattatacactcacatttcaagggtgtcagaccacacagggacgcctgccttggtccttcacccttagtggcaagtcccgcttttctggggaagggtcaagtaccccaaccccttctcttgtctctaccccttctctgcttttctggggcaggggcaagtacccctcaaccccttctccttcacccttagcggcaagtcccgctttcctagggggcaagaaccccccaatcccttatttccacaccccaacctcttatctctgcgccccagtcccttatttccacgccccaacctcttgtctctgcgccccaatcccttatctctgcgccccaatcccttatttccacaccccaacctcttatctctgcgccccagtcccttatttccacgccccaacctcttatctctgcgtcccaatcccttatttccacgccccaacctcttatctctgcgccccaatcccttatctctgcgccccaatgccttatttccgcgccccgacccccccctcccgcttttctggaaggtaagaacccccgaaccccttccctccgtgtctctacgctctcttttctctgggcttgcctccttcactatgggcttgcctccttcactatgggcaagcttccaccttccattcctccttcttctcccttagcctgtattcttaagaacttaaaacctcttcaactctcacctgacctaaaatctaggcgtcttattttcttctgcaatgccgcttgaccccaatacaaactccacagtagttccaaatagccggaaaacggcactttcaatttttccatcctacaagatctaactaattcttgtcgtaaaatgggcaaatggtctgagatgcctgacgtccaggcattcttttacacatcagtccattcctagtctctgtgcccaatgcaactcgtcccaaatctcccgcctgtcccctcagtcccaaccccaagcgtcgctgagtctttctaatcttccttttctacagacccatctgacctctcccctcctcgcctggccaagctaggtcccaattcttcctcagcctccactcctccaccctataatccttttatcgcctcccctcctcacacctgctccggcttacagtttcattccgtgactagccctcccccacctgcccagcaatttactcttaaaaaggtggctggagctaaagacatagtcaaggttaatgctcctttttctttatcccagatcagatagcgtttaggctctttttcaccaaatataaaaacccagttcatggctcgtttggcagcaaccctgaggcgcttcacagccccagaccctaaaaggtcaaaaggccgtcttattctcaatatacattctattacccaatctgctcccgacattaactccaaaaattggaatctggccctcaaaccccacagcaggacttaattaacctcaccttcaaggtgtacaataacagaaaaaagttgcaattccttgcctccactgtgagacaaaccccagccacatctccagcacacaagaacttccaaacgcctgaactgcagcagccaggcgttcctccagaacctcctcccccaggagcttactacaagtgccagaaatctggccaccaggccaaggaatgcctgcagcccaggattcctcctaagccgtgtcccatctgtacgggaccccactggaaatcggactgttcaactcacctggcagacactcccagagcccctggaactctgacccagggctctctgactgactccttcttggcttaccggctgaaaactgacgctgcctgatcgcctcggaagccccgtagaccatcacggacgccgagctttaggtaactctcacagtggaaggtaagtccgtccccttcttaatcaatatggaggctacccactccacattaccttcttttcaagggcctgtttcccttgcctccataactgttgtgggtattgacagccaggtttctaaacttcttaaaactccccaactctggtgccaacttagacaacactcttttatgcactcttttttagttatctccacctgcccagttcccttattaggccgagatattttaaccaaatgatctgcttccctgactattcctggactacagccacatctcattgctgcccttcttcccaatccaaagcctcctttgcgtcctcctcttgtatcccccaccttaacccacaagtataagatacctctactccctccttggtgaccgatcatgcaccccttaccatctcattaaaacctaatcacccttaccccgctcaatgccaatatcccatcccacagcatgctttgaaaggattaaagcctgttatcactcgcctgctacagcatggccttttaaagcctataaactctccttacaattcccccattttacctgtcctaaaaccagacaagccttacaagttagttcaggatctatgccttatcaaccaaattgttttgcctatccaccctatgatgccaaacccatatactctcctatcctcaatacctccctccacaatccattattctgttctggatctcaaacgtgctttctttactactcctttgtacctgtcatcccagcctctcttcgctttcacttggactgaccctgacactcatcaggttcagcaaattacctgggctgtactgccgcaaggcttcacagacagcccccattacttcagtcaagcccaaatttcatcctcatctgttacctatctcggcataattctcgtaaaaacacacgagctctccctgctgatcgtgtctgattaatctcccaaacctcaatcccttacaaaacaacaaactcctttccttcctaggcatggttaatgcagtcagaattcttacacaagagccaggaccgcaccctgtagcctttctgtccaaacaacttgaccttactgttttagcctagccctcatgtctgcgtgcagcggctgccgctgctttaatacttttagaggcctttcctacaaggtctgagaaggccaccgtagtcatttcttcccttctgtcagacataattcctcagtttagccttcccacctctatacagtctgataacagaccagcctttattagtcaaatcagccaagcattttttcaggctcttagtattcagtgacagactaatggtctattaaaaacacacctcaccaagctcagccaccaacttaaaaaggactggacaatacttttaccactttcccttctcagaagtcagacctgtcctcagaatgctacaaggtacagcccatttaagctcctgtatagacgctcctttttattaggccccagtctcattccagacaccagaccaacttcgactatgcccccaaataacttgtcatccctactatcttccgtctagtcatactcctattcaccattctcaactactcatacatgccctgctcttgtttacactgccggtttacactgtttctccaagccatcacagctgatatctcctcgtcctatccccaaactgccactcttaactcttgaataaataatctttgctggcaggactatgctgaacctccataggcactctctaattagatgtcctaggtcctcccaattcttagtccttttatacctgtttttctccttctcttattccacttagtttttcaattcatacaaaaccgtatccaggccatcaccaatcattctatacgacaaatgtttcttctaacaaccccacaatatcaccccttaccacagatctcccttcagcttaatctctcccactctaggttcccacaccgcccctaatcctgcttgaagcagccctgagaaacatcacccattctctctccataccaccccccaaaaattttcgccgccccaacacttcaacactattttgttttatttttcttattaatagaagaaggcaggaatgtcaggcctctgagcccaagccaagccatcgcatcccctgtgatttgcacctatacgcccagatggcctgaagtaactgaagaatcacaaaagaagtgaaaaggccctgccccgccttaactgacgacattccaccattgtgatttgttcctgccccaacttaactgagtgattaaccctgggaatttccttctcctggctcagaagctcccccactgagcaccttgtgacccccgcccctgcccaccagagaacaaccccctttgactgtaattttccattaccttcccaaatcctataaaacggccccacccctatctcccttcgctgactctcttttcggactcagcccacctgcacccaggtgaaataaacaaccatgttgctcacacaaagcctgtttggtgttctcttcacacggacgcgcatgaaactcactatacaggcaggacactttgaggcatctaacttgtggagacaagtacaattgtacagtttagatacatgtgttaataaaccactagagagtattataaactagatcaatgctatcaatttcttcctaacaaacactcacagacaaaattagactataacagaggtaattttaaagcatagagcacactttggcaaaaatgacagcccatgtgggatgccaggagaaaggggcagcttgaggcaagagatcaagtggaagggtggctcagaaagaggacaccaaaaacaaacttacctgagataaaggtgttgccagcactggccaagctccgatcgtctgaacattagcctaggactttcctattactgttctgctacattatgaacttgaggtttataggggctgactttggagttcaactgcctagggtcttctatgaaataatgtgctttgaaatacagtcaaacacacagtgaacaaacaaataagatagaaagtgactctgctaagtttatttcaaacaagggacacttgaagttagtttttcacccctatgacaaagaacacacgtgagctcacaggccctctatgcttctccccttctggaacagaagacctgctctagaactcattttaaggggctgatctgaggttcttcccataagcagtgactacagctaatcccattaaatgcttcccagaaagcacttctaaaactggatctccaatttagactttttccccgatgggtccaaaggaaggatgagtggaaacatgaagactattctttctcctgaggcagaatcaagaatttaagccattgtgcaatccaatccaagatatcctccaagtccaaagccatgtccagattctctcctctccaatccaagaaaaaaggagattaacaggggtatcctcttagacacaattcctcttgatggagctgagtatttttgtgactgggctgggagatagaaatggggaaagagagtttggttactggctattgaaagggcttctttcctaagtgggatctttgatgtttgtcaaggctcgagctccagctgaaacttttcccacagtgcgaacatttataaggtttctctccagtgtgaaccctctgatgtctattaaagtttgatctctgaatgaaacttttctcacagataggacatttatagggtttctctcctgtgtggattttctcgtggtggcgcaatcctgagaagtcactaaagcctttcccacagtaatcacatttacagggcttctctcccgtgtgagttctctgatgcttcacaaagtctgaactccgcagaaaggcttttttgcagatggtgcactgaaagtatgtctctccggtgtgagttctttggtgaaaaataagctgagaattcctataaaaggtcttcccacactccctgcaggtggggagcttctgggccatgggggctcttggctgccccttctgggaggtctctctcttctcctcaagccacatggtggacatttctcctgaatgaggattaggcaaatgctgacctagttgtttctcagaaatcctttcttgaggagacagctgttcccctgttccctcatcctgaatgttttgcagagcctcagggagattctctccttctccaaagcatcctggctcatcctcagtgaagaagcccctcaaggaagcctgagaaggaacctctcctgaagcttgacaggaagcatgcaggagctcctggtccctgtgattctccaaatttaggttctccttgtcattctcttgtctatctcctaaaagaagaaagaagatttgaaatggttcaagtgctatgccctgttttctaactcatatgtcaaagagagggtcatcataaaacattcattttcttttttttttttttttttttttttttagggcattagtaagtgagaaagaaaactaccatatggcccaaatgttcaaactcacttcccctgtcctgggttcaaggctaaatggttcagctctggagctgaggatttttaaacaacacaggagtactcataaagtgatcactccgtaaataaagccacatgtatttcttaaggaccaggaaaaaaacaagtatattataggcaactactgcttttaaagtgatttttatctgattatatataaaagataaatatggtaactaaaaaaaaaaactgaagagagagaaatatatacagaagaaaaccaaatccgcctcaatcttactacccagagataacaactatgagcatacatttcctttcagtctttttaatttaacctatatgtatgcaggtatatgctattttctgacataatttgtgtcatattgtacatatagttctatatctagctatggagcatttaattgtgaatggtggcattaatcaatgtaatatagagtctccctctcccattcataagacgcccaaaatctgtgaaatgcacgtgtcattttaccacagctgcaatgcagcggggctttactataaaagtgaatcccttgatctgtgcttgaatctagtatttacatgccctttattaaatcacactagcaactggaagtttgtttttctcatcgtaacttgggtttttggttatagtacttaatgatgcaaatagaaaatttttattttggtggtaggattttcaacttttataaattattttaactatatagatctaaagatgccatttacctttctctttcacatattagtgtcttttcaattgtctgccagggatctagacatcttctagagagctagatctgaacttgttaagtcaaaaagccttagaatgtccctgaatctaaaaataaaataaaataaaataaaagccttagaatatattcctctcaaatggcaaaggtactttctcgtgtttttaaaaaagcctttataaatatcattttaaagagctgagtaatggcccatcaagaagatgtcataataaacatataatttgttcccctaccatggaaatctaatttgcttattgtgtttttgcgactacaaataatgctgtgatcagcagttttcttcataagtttttgcccacatttctcatcaatatctcaaaggaatttctcaaagtagaattactgtgtcaacgggcataaatattaaggctcttgacacctactggcaacccaacttccagaacaactctgccatcctctcatatgtgaaattgggcagagggggaagtgggtattcaatacttaaatattgaatatttttaaacttatgccatttagatggatgaaaagtggtttttcattgttttaaattttaattcttaagttatgaaaggatgaatctttatcacatttatgagctatttttcatactcgaagactgctgcccatattttactgggaaagcacatttttcttatcaactttctttaactctttctatatcaacaaaaataatcatttatctgtcatggtcatgaaaactttttttttgagatggagttttgctctgtcacccaggctggagtgcaatggcgtgatcttggctcactgcaacctctgcctcccaggttcaagcgattctcctgcctcagcctcccaagtagctgggattacaggtgcccgccactatgcccagctaatttttgtagtgtagttagatggggtttcaccatgttagccaggctggtctcgaactcctgacctcaaatgatccccccgcctcagcctcccacagtgctgggattacagacgtgagccaccgcaccagcctgatcatgctaaattcttatacagaccagcatctcttttctaggctcccttttctgttctattgatctgtgcatctatttttatatcagaatcacactattttaatgattttttacctttataatacaacagacaatattttcagatctaacattcatgaaacattcttctttcaaaacatttttttaaaactattcttgcatgttatattcttccagataactactttaaaaactttaatcctttggatttttattagcagggtaagtatatggctttttgagactgccccctgctgacctgttttaactaggagctgttcttccatatggtcaactataacagcatattcactctctatattgacttttgcccctgatctgagtccagatttggtaaactggcaaactgttgtatttttcaaaccaggcctttcccatttggttactgtgacttccacaattattctaggtctcctccccggacagcccgactcctgcactgacttcctgcagacttctctcctccaagtgttcccttcctatctgtcctacacgttgctgccggattcatcttcctaaacctctttccacatatcctcttttttttttttttttttgagacagagtttcattcttgttgcccaggctggagtgcaatggcgcggtctcggctcactgcaacctccgcctcccaggttcaagcgattctcctgcctcagcctcccaagtagctgggattacaggtgctcacaccatgcccggttttttgtttttttttgcattttttgtagagacaggaacctataatagctttttttttttttttttttgcctatcaaggcaggatgacccttgtagactcctcacatctggttaaaggcagtatctaatgggaccatgtcagcagaggtgggatgaaggaaaaacaaacaaacaaaaaacgagtaggaatatagtgagctatatatagcaaataaggtcagactactaggagctatatgggaaatctctgcagcttccattcaattctactatgaacccaaaactcgtcttaaaaataaatcctgtccaaaaaaaaatcctactgcaacaacctccaaagcaatattttcaaccttttctgactacaacccactataagttctatggactaaactgtgatcccccaaattcatacgttgaaaccctagcccccagtatgatggtatttggagatggggcctggggccttagggagggattaggtctagatgaggtcctaagggtggagtcctcatgatgggattagtttcctgtctcctcctctccctctctcacctccccctctcccagtctctcccttcctctccgcctctcctctccccaacccccctctctgctatgtgaagacacagcaagaaaagcgaggtcagcaaaccatactggcaccctgatcttggacttcccaacctccagaaatgtgagaaataaatgtttgttgtttaagcaacttagtctatggtattttgttacagcagcccaagctaaggcagtaatcgatatattaatattgaaacacagtacatgcacacatattttaaacaaatatttcctgaaacactacccacccctacatctgatatttcctcttcaatcttattgtgtttttttttaacgctggttgtaactctatcaaatgatttcacgactcactaattggttatgcaatgcagtttgaaaaattctgttccagaagaaatccttgtgaaatggcctgataaatacgttgtgtaaaattaaaatcaaatatctcagctaatgattgctctctctgtggtatattagcaaaagaaaataattaattagatgccactggggagaaagaatggcttgccctacaattcccatccttggtcctcttcttcctctaaggttctgggatttactgtatatataaaagtgtgtgtgtgtgtgtgtgtgtgtgtgtgtgtgtgtgtgtgtaggtttcgcaattagtttttacgtaacttcaatgtttcagaaaaagtgtagaaagcaaagaatgactattttacaagataacaagttaagatttcttcttccctagtcttaaataaattatttatacgaagtatttgttgatgctgctgttttaagaagtgttaggtgcatagggattagataaaacatttttttctgtttgttttatgtctagatactctaacttcttgctaggaagggtaataatggctgctacataatcctttgcaatgaaattctactctatttgtattggtcttaatttgtgtgaatcttaattctttcagagaaagaaagctaaaataacagacaagattaaaggcagcaggtctgatgtgtggtcttccttccatagttaaatatgtgtcaacagccctatagccagagataagtagactcaatctcaatagttaaatcaaaccaatcagatcatggctagttataaccaacgtaatagaatattctgcctcccctgacctccttcaccacctccccaatcacctccaatttaatgacaggcagtcagaaatgattccagaccaatgaaagattactcacctatgcaggtgggtcttgggatcttctcattgacatgaaggtatattcctgccagctcttccccaaattctattgaattagtcaggtcagatttgggatgggaaatgcctgctatagagagaaagatgtatggtgggcctggatgaatagggaagactgggagctcaagctgtgtctttcaaaggagcaccctacgcatgagggaaaatatgaaggctctggacacttgcagaaactcaccttagaacagtgtgtggagcttgtaagacaccagtactcacaggatgaccttgacagatggtaaaggccatgaaaagaagagtctaggcaggtggacagaaaggtctgtagactacctggcaggctggtgtgagaatcatgatggggatcccaccaatggttggttgacaagtgtggtttagtagaaaagagcatggactcagaaccagccacagctgagttccatcataactcagcccacttatgagctatgtggcagtgggtaagtatttgatctgacactcactttcatcaggcttaaaatgagaataccatcatcaatttcatagattaaagaagttactccgtgcaatgtacccacaaacagttcctggcacacggaatactttcaatacaaggaagttcttactgttaattctgctagctccaacttgccccagttcccaactgtgtccctaacgatttctttcacctggcgattttcagttcagcagatgtctctataagtgcatggaaaatgcctcacagttttccagtccttctacctccttccatcagactaacccacaccctcacctcctgagaccattttcccataggtctccagcatgagatcccagtattgctccttttgagtggaatccagttgtctccactgttcctggaaaaaaaaaaaaaaaagcaatacaataccatgactccaatgaaggtgtttgaacctgccttccctgcctaaaggaaagctgagaagacagaaacgtgccataggatcctggccatcgcaagacctgagaaatcccagcagagtggttcaagggacaaagaggccaaagggaaaacaacagtccctatatcagtgtttctttccttggtaagaaaacatctaggctttacattctgcacctcttcaggtgaattatttaaaagtggagaacgtatagagggcaggagccttttccatactatttgtttttatttgggtttttttttttttttagatggaatctcactctgtcgcccaggctggagtgcagtggagcaatctctgctcactgcaacctccacctcccaggttcaagcgattctcctgcctcagcttcccgaggaagcttggactataggcacatgccaccgtgcctggctaatttttgtatttttagtagagatggggtttcaccatcaggatggtctcgatctcctgaccttgtgatctgcccgccttggcctcctaaagtgctgggattacaggtgtgagccaccttgcctggccggtactatttgttttttgtttttgtttttgttttttaactcaagtgcttgtactagacgtctttgaggaggaagagtctgatagtcccactatttaattaaaatcaggaaattcaaaaagcaaagaaagaagttaaaaaggaatctgttggaaaagcaagtgcgaatcagtaagatgtagttaagagtcaactgcattgtaagcttcaccctgaaacaaagattggtatattcagagaagagagagatgttatagccatacttgaaatatcttaaagttctgcatttagagtctaacattaaattagttttctttccagatagtggaaaactggtaggttctctggagcaaggtgtcccaatctccaaaagaagccctgcttttcctatgaaacgacagactggagactcaaaactgggaataccatacagctagggtctgctttcatgaattcaaatttcagtcttctaccaagaagctgactattagaaactcagattgtatagcaaagggattagcagcccattttttggagtcagacgtactgagttttaagtcccaacgttgccactttctagctgtgcaaccttgagcaagttatttaaccttccagagtttcaggcctcacctaatgatggcactgaactcaaaaaagtgttgtgaggtttgagataaataatgcaagtgtcacctgttttcatagcacactgtactttttttatttatagtatttatccatttattaactatttatgtgtatgtacaaatgtatgtgcacacatgtaagtatttgattaactgttgcctctactagcaatgtaagctccatgagaaaaggactctgtcatcctctccattgtataataccttcccagttcccaagaccctgtccaggacagaagaggcacttgatatatgttaccagggtgaaataaagcccttagcaaacaggtcctcagtagataatatatattattaccatcacatgcagtctcccagtctcaccccaagggtttgcagagagaattaagggattctgcacactttcagaaaccgcaaagtggatagacatgaatagccaggcttcagggaatagaaatgaggaaaggaactacaaagtcatcctcctactgtacacaatatactgtttggggaaggcactctctgatatgatttggctctgtgtccccacccaaatctcatcttgtagctcccataattcccatgtattgtgagagggacctggtgggagataactgaaccaagtgggcagttctttcctgtgctgttctcatcatagtgaataagataacatccgatggctttaaaaatgggagtttgcctgcacaagctctctctttgcctgccgccatccttgaaagatgtgacttgctcctccttgccttccaccatgattgggggcctccccagccatatggaattgtaagtccaattaaacctctttcttttgtaaactgcccattctcaggtatgtctttatcagcggtgtgaaaacggactaatacactctcagtcctaagtcaagtctgccccctagcacatcaaagggaagtggaaatggctcaaggagaaaagagataccaaaaactgttcaattagcaggtgctaagccaaacacacaaacgaaagagggtttggacttttttgggtgggaaggataggaagctgaaaagcgacctcaatatactgaattacacagtcaactattaactataaccacatttttaatgtgaactttaatttaaattttttaatttttaaagtataaacagctagcagcttattctgttaatcttctgtgaatgcagctattttaacaacctcctgaaaataatcacttgagcaaacattgctgaacacaggagttctcagtctttgtggtcagaacacatggaccttggcttcagtgctagcagagaaaaggatgcacttgccaagcacagtaatatctgcctggctgcctggcttgctgacacaggatctattccatgaacaccagaacagtaactaccaagaagagtacaaggcagaaaaggatacagccaccaaaacccccaagggtcaaaatcagctcactcaaaaaccagaaaagttgcttcaggagcactaacagggtacctccagcttaaaaacacaaatttactcaagaaactgccaagaagctgggtacttcgaataaaacctcctactgaagaggcaagacgccaatggcagccagcttgcctctttctcatatttagaagagacggaaaaacctaactttctatcctgaaagacagacacatgggatttgatgggaaaattctatttttgtgtggaactggcaccatcttgtgggtttataagatattacaactgacttacacttagttacacgctgttcctttcctttaagtctgaaaacaggggaaggtgagtaaatgcactgctggagtctatgtgaggttccaaccgagtcatggtttccactaatgaaataactactgtgtactgatagtaataccgtatcattattctggcattatttatgaagttcctcacttatttaagagattagagggagtgattaatttaaaaattccttttacttccaaaggattccattaaatatcaaagtctttctgatgcaaataattgctgttagtttggaggggatattcagattgggtagggacaacttttgttcatttgacttaaatggttgctaactagttatcatctgaaggtagggaaatacagacacacatatatatgtaaatacggttgtaaaaaacaaattggtgctgatgagcattttaaatcttttgactttaagttatccagaacaggtgaggatactctgtacctactacagaaacaacaataatcctccaagcctggttgacatattccacagaacacccaaatctttttcaccaagcaacatcttgcttaacaatttggtttctgggcaccttgaaagcaggcagaagggtacctttgattcactaaaaagatatttctctcccctgccacctccccatccaccttcccccagagtaaactatgaaattggtattctagtttttatatatctgagcctggagagctgaagctcagaccctggtctgaaacacagcattacctactgccttctctattttcatattcacgctacagcagattgcaaggcaagtcccaagaggagttccttcaacgttttaaatgatgttttaattaagatgtataggttcgtgaaaaaaaaattttttacaaaatacaacttttcaaaattgttaactaaatatcaacataaatctgtcccagagacttttatgtacaagcaaaaatgaagtattaggaattgttgaatttaccttctgcctgaaacaactaaaaatgggacaaaatgtatgaaacaatagttttcagacatttcacattacacaagcagagcagaacaagatccctgaaagtgggaaagcaaattcagtgagctctagttatccaaacttactgcctagacagaggatccaggcagcagcacaggaagggaaacccaggctgagccaggcagcctccctgagttgagcagaaggagctcagagtctggaaatgccaagatccttagaatcgacagggtagaaaaactggagagaaggaaactgcacaaagagaaagctccagagatctacagagcgtccccgcaaagtctggaaaataaccacccaaaagaatcagagggaacaatcccctgagttcacacagtgctggaaacagttcgtatttccaccaggcaaagtggaaaacctggtatatgaaggggcatcagattactcagaatactcagaagggaagtgccttagcatggaaagaataatcctcgactaaatgtttctctggtgccatgtaataaactgtgtccaaataactgcaccccatagcaaagttcaagaacatttatagtaatacaaaaatatatagcaccccaccaatgtgatacccaatcaaagattaccaggcacgggcaacatagtaagacacacaaaaatttaaaaattagccaagcaggccgggcatggtggctcccgcctgtaatcccagcactctgggagacccagctgggtggatcacttgaggtcaggagttcgagaccagcctggtcaacatggtgaaaccccatctctactaaaaatacaaaaattagtcaggcatggtggcacacgcctgtaatcccagctactcaggagactgaggcaggagaattgcttgaaccaagaagtcggaggttgtagtgagctgagatcgcgccactgcactccagcctaggcaacacagcaagaccctgtctcaaaaaaaaaaaaaaaaattagccaagcattgtggcacatgcctgtagttctagctactcaggaggctgaggcaggagtatggtttgagcccgggaggtcaaggctgcagtgagctatgactgcacaactgcactctagcctgggagacaaagtgaaaccctgtctcaaaacaaacgaaaaagacaaagattaccaggcatacaaagaagtgggaaaatacatctcataatgagaataatcattgatcaaaactgacccagaaccaatgcaggtagtaatcagtagataaggatattaatacaaatacaactatattccatatgttcaagaagctagagaaaaaattgaacacattaagtatagacatgaaagatacaataaagccccaaatcaaacttctagaggtgaaaaattcatctaaaatgaaaaatatactggaagagattaacagcagattagatgctgtgagatgaaaagactaatgaacttaaagacatcaaaatagaaactgtcctaaatgaaacaccaagacttcaaaaacagaatgaaaaatatactggatgagattaacagcagatcagatactataaaagaaaagattaatgaacttgaagacaaacagaaattgtccaaaataaaagaccaagacttcaataacagaatgaaaaatatactggatgagattaacagcagatcagatactataaaagaaaagattaatgaactttaagacatacagaaattgtccaaaataaaacaccaagacttcaaaaacagaaaaacaatcagtaagctgtgggacaacttgaagagctctgatacatgtatatacattatcattatacacattccacaggtattatttcccaagtccttaaaggagaggagaaataagcgagacagaaaaaaaaatgctttagaaataatggccaaaaattttccaagtttagtgaaaaccatacacccacagagctaggaaactcaataaatcccaattacatgaaatgtgaaaatgactccaaggcacatcaaaatcaaattgttttaaaaaatgagaatacactgaaataagcaaatatatatatatgtatatatatacacattatatgcataagaacaaagataagagtacatttggcatgattctatttttacaaaactctagaaaaagtaaactaacatatggtgacagacagcagatcagaggtttcctcaggatggagaatggggtgaagagaagcaggaggatgagattataaaaggtaaaaagtttccttttcatcgcttttgtacgtcagctcacctgaggtgctgctgggagcagtgaggctccgaggtcctggtctctgatcagcctttcctccagtcgggcaggctgggaggcagccagggctgaagtgaggagaggaagttttcagaatctggatgtcttccttaaccactccccagagggcgcagataacaatcttcacaaatcagaacaatacctgaacaatacctgtactgccatctatatttcaagacttgtgtttatctccctgacacactccaaccccctccaacattccagtctcacccatatgttctcccacctccttcctcagagccaaaatccaaatggtctggcccagtcataaagcagtttaaaacacagactttgactctccaaacaagagcggtttatttaggtctaacctgtttgcaaacctctcagggatacgccaatctgagcagcataccatttcaactcacttaggcctactaatcacaatcccaaaatctctccaagagaacaccacacagcaccatcctcacctagttctgcttctgtgtcagattcctctttcacgatgtggctcagaagctccccaggccctgaggatgaattctcaagtcccaactcctgaggcaccacttcaagatggggctccacttcccccacttggcagcttggagattccatcttctctgataagatgtcctgtcctagaacctggatactgatctagagaccatatattaattagtaattactgaagaatccagagtaaggatctctaaaagacacaaagcttactctctacaacagatcataagacaatttctaaggatgtggagaaagagaaaaccagcttttatttctagtccagcaggaaccagggaaagaaacgtcccaaaagacaccaaaagctgaggcccgaatcaggcgtgggagaccttcaagacatgccactaacgtgcttctactggatatgcgccaccaatgaaaactcaggcatcttttaaataacttctcaaacattctagtctaaaggtggaatgcgctgggagactttaccctcaatcctcaatagctaaagagtgttgagagtcagagagtgttagaattacgtgaggtatgggggaacccagctgtggtataataagaaatacacatttagtctttgtccccagttcccattcccgcagagctcctaaaaccctggtaatttcttgagggacaggtgaaagaagagtctttgttattcataaggagcccttctcaaccacacctgagtttatgctaggctcctagatagcttcaggatgggggctggttgccagaggaaccaaccttgagattaaaaggttggaactttcagtatctccacccagcttctgaggaggggagggcagctggagatactcaatcaccaacggcaaatgactgtatcaagtgtgccaaagcagtgaagcctccataaaaatccctaaaccatgaggttcaggaagcttccaggttggtgacctcatggaggtactggtaacgtagcacgccaggagaagcatggaagctccacgctctttcccccacaccttgctctatgcagctcttctctctggctgttaatgagttgtatcctttagagtaagtcagtaacaggaagtaaaatccttccctgagttctgtaagtcattctaactaattatcaaacttgaagagaagactgtgggaacctccgaatttatagccaatttgtcagaagtacaggtggcccctgggacttgtgactggcatctgagaacaggagcagtcttggattgagccctgaacctccagagttagcttcagaactgaattgctggacactgtactggtgttagagaatcacagaattggccattggtgtgaaaagccccacccattttgtgtcataagtggtatcagaaaaaagacaacacacctgatgggaccagagaggagccctgtgtttcactcgcagatcataataccctctgcttacccattgccacagtctctgggggtcccccttcaagctttccacaagggtcactgcctcttctccacttcctggacactgtttccgcacccacatctggatctccccaggcaggatggtcagaaactgctccaacatgaggatctctaggatctgctctttggtgtgaacctctggctgtagccactggaaacagagcttccgaagttgcttcaaggtctcatgaggcccagacatcacctggtaacggaactgcctgaaaagctggcgtgcggtctcagggctggagagttcctcttgaagggcagcatctgattctgagaactgggagtcctcggccttcgccagcgatggcagcaggcctagggcctgccccaagtcaacgggcattgtccagcctggcaagtccttttaagtaaagtgcttctgcagtggaattgtctccggcaagaactaggtcttcaccaggacactaaaaagggaatgagattgagtgctacacagaggaaggggacacattttcagaaagaacaaattcacatgccctacccgagaagccatggggtcaactatggagcttttgaaattgctcaatggatacacgattctattttgaaagattataaacttgaagccacaaagcaaactactgatactgtatctaaacagccaccatttccctgcccattttataatgttctttcttggtcttcaaatgtccagacaaaatgaagaataaaatgcaccatacgaaactttttcactataggtttccaggtaaacggctcttctacaaaacacttctacatcttcatctatatatctgcatactaaaaaataaagctggaaaaagatattaatgccctaggaataaaagctaatgcctacatgcttctgtaataaataggaggttaaagagaacaagttaagtcttccaaaaggtaccaaaagtacttccaaaagtataccaaaaaggtgtaatgaaacttccaagagaggtcttttgagtgccatattaaaataggtctatttgagaatttatgaaaaaaacaagtatcatacctgacactttcaaccttggggttaaagagggtgagaaggctgggcatggtggctcacgcctgtaatcccagcactttgggaggccgaggcaggtggatcacgtggtcaggagatcgaaaccatcctggttaacacggtgaaaccccgtctctactaaaaaaaaatacaaaaaattagccgggcatggtggcgggcacctgtagtcccagctactcaggaggctgaggcagaagaatggggtgaacccaggaggtggagcttgcagtgagccaagatcgcgccactgcactccagcctgggggacagagagagactccgtctcacaaaaaaaaaaaaaaaaaaaaaaaagagggttgagaagactaactaccttgaaaatactcctatggtgttgatataaataatcactattttatgtgaatggtatcaaattttagaagatcacaactaagacagtagaaagagaaatattaaatcgcaaataatattattctaaaaaggatcatccactacttctagttaactttcttgcaagtaatcacaatataggattactgggtaaatccttaaatgttatgaagaatttggtggtcatcatttctccctaagactaatcacagcaatttttaaaaaaagataccccatcacttgaggatctggcttaatcagagatcagtacaatactctagctttttgtagctgcttatttcttaaggtgtaggaaacaatgtcttcatccttaccgtttcaccaaaataatttatccgacattggaaaatcatttaaaaactaaaaaagaaaaacaattttttttcaagggcctgagaaaggaaaaagcgaagtcaaaagaattacagttgaccattgaataatgcaggagataggggcgccaaccccccacacagtagaaaatccatatataacttctgattccccaaaagcttagcagtctattgactgatgccttaaatagttgattaacatacattttgcatgttactgtatttttgtgataaagtaagttagacaaaatattattaagaaaattataaggaagaggccaggccaggtggctcacgcctgtaatcccagcactttgggaggctgaggtggctggatcacaaggtcaggagatcgagaccatcctggctaacacggtgaaaccccttctctactaaaaatacaaaaaattagccaggcgtggtggcgggcgcctgtgatcccagctactcgggaggctgaggcaggagaatggcatgaacctgggaggcagagcttgcagtgagctgagatcgtgccactgcactccaacctgggcgacagagcgagactccgtctcaaaaaaaaaagaaaaagaaaattataaggaagagaaactacatttactattcactaagtggaagtgaatcaccataaaggtggtcaccttcatcatcttcacactgagtagcctgaagaggacaaggaacaggagaaggagaaggaagggttggtcttgcagtcgcaggagtcacagaggcagatgaaaatccttgtataaatggacccttgcaaccgtaatccaataccaaatgttttttatgtggtcctcattaaatttattttttgcttaaaaagaaacccaggtctgagcgcagtggctcacgcctgtaatcctagcattctgggcgtccaaggcagggggatcatttgaggtcaggagttcaagaccagcctgtccaacatggcaaaaccccatctctactaaaaatacaaaaattaaccgggcgtggtggtgaatgcctgtaatcccagctaccagggaggctgagtgaggcaggagaattgcttgaacccaagggggcagaggttgcagtgagccgagatcacaccactgcaagaaaaaaaaaaagaaacccaggccaggcgcggtgggtcacgcctgcaatcccagcactttggaagccctaggcgggaggaccacctgtggtcaagagtttgagaccagcctggccaacgcagtaaaaccccatctctactaaaaatacaaaaattagctgggcatggtggtgcgcacctgtaatcccagcaactcaggaggctgaggtaggagaacagcctgaacctgggaggcggaagttgcagtgagtcaagatcgtaccactgcactccagcctgggcgacagagggagactccatctcaaaaaaaaaaaaaaaaagagtcagtgaagtcaaaaaatctgaacactatcaaccgacttgctctaattgacattttcagaacactagacccaagaactgcagagtatacattcattacaagtgcaaagagtattcatcaaaacagaccatatgcataattttcaaatgactgatatcttaaaattagctctaaaaatattacgcaaagtggtattgctaaaaagccattaaagcaataccaaaaaacactcaaaaacccaatatctgatagaaaaggaacacaagagaaacaaaaccagaaaggtcaaatggaaaactttagagcttcctgggttcaaatatattctctgatcatagtgcaattaaagtagaaatcaataacaataactagaaaatcccaatttatggaaattactaaataatgctcttaacccatagtcaaagaaaaaaatcacaaaggaaattaaaatatgttttcatactgagtgacaatgacagcattatcaaaccacctgaaaagcagctttagctcagaggtaaacctacagtttcaaataacatcttaaaaaacgaataaatatatttttaaaaataccttgctttgtaaatccaacctatttggctcaagagtttcaaataacaagcggcaagattttagatagcaagataccgacctgtaaacttactgcaatttatctgtttcctaaattaagatagcagtttagataatatttaagagaaatgacattttggaaaaactacagattttataaaatacttaaatcttttgttagtaatattatactcccaggtagtgtgtaagaaaaatgtctcgattattcaaaattaaattactttatatagtattaaaaatttaatagagtttatattccgataacctcatgaggaactgcccccattagttatgaaaaaaaaataaggttgtctgttatacctgttattaaacctttaacaaatagaatgaatttttaaaagtgcattctaggtgtaatatacacaagtggttacatacatggttacatatataagtaaccatttgttaagcacctactacgtatcggctcattattaagctcggttcatgtatttccaattcccacaattaccctggtgtacagatcaggaacctccgaggctcacaagtggcagccagattaacccaggaagctctaaagcctttgctttggggagaactgccaacgtctggtgatttgttggggcgttttctggttgtcacaagcagctaggggaactggcatttagtgctcgaggccagggcagcgctgctcattggatatgtattctccaccatgcgccccccaaatgccgactgcactctgatgagagagggagagactccaggcatcatcccatcgggtttcctcttccagagactcattttcagcccttaggggaagacagcggggaggagcccgttttcggtcccagtgcagagacccggccggtcccgcggggcgcagaggcgcaggaatgcagagccgggacggggttcacacatccccccgcacccacggtccactcccagccatggctgccccggccccgcactcgccacgtcccccgcgcgctcccagacgcatgggcaagggagcccgctggcccctccgtagctccggggtgcccagctgagtcaggtgcggacgcagatagcgcaaggcctgaccccgagcggccggaggccgggaccgccccgcaagcgcgctcacctcggcccgcggcgccggctccgggcgcacttccgggagctgggtggctgcgcgcgcctcaggcggcaggcgaacgacgtgcggcaccgggcggagctagggggcgggggcggagctgataccgaagctcctattggccgtcggggacgccccgcctctctctggcgttgcagcccaggagcctccaccgacatggcagcgaggttcccgagccaacgccatcctccgttccttccgtcactcactcactaatcactgttcctgagttccttcacttctcacccgtcatttattgcgcacctattctgtgccaggcactcggccaagcactgcgaggccttcaaagatcatttctttgtctctcccaaacccttccgcccagtcccacccgcagagctgcaacgctctgccattatccctgattcttaaccgccgcctttctcctttccgttcttgcctcactgggcctccctgagacacttgatttgccccaaccttcttcctctgtcttggttctcccactctcatcagctctgcatcccctgggtcctctcccacttctccccattccgttggggctagtccaatgtggtgccatcctctttccacctgcgtctctctctcttctctctctctctctcaacaaatgtcatccctgactcttcccttctccttccctttcccacacgccaacaatggctgaatcctctgatttgacctcattgtctctcagacacctcaccctctctcccttctcactatccctccctcggctcagttccacaccatttgtaatggtcaagaccttcttaccctttccccagcgtccagtgttgccggtttccaggccatcctgtgctgggccacgacatcaacttgtgatactaagttgcattaatggaagtatcatgtcaaagtttgggtgttccaccttgggcaactggcaaagaggagggtattcaaaaaaagctgccatgttccccaataacctatggaaataaaataaataaaaaataaaaatttaaagaagagctgtcattatcataacatgtcctgtacctgtcattatcataacatgtcctgtacctgtcattatcataacatgtcctgtacctgtcattatcataacatgtcctgtacctgtcattatcataacatgtcctgtacctgtcattatcataacatgtcctgtacctgtcccatgtttacaagaattaaagatcctcctctggagaaataaagcttgatgcggggatgggattacatcttcatgtacctgaaaagtgaccagcggaaaagggattcgacatgttctcttaagtcccagggtctgaacaagatcctatgtgtgaaactactgtttcagcctgacataggtggaagtttctagtctttttttttttttttttttttttttgtatttttggtggagacggggtttcaccatgttggccaggctggtctcgaactcgtgacctcaagtgatccacccaccttggcctcccaaagtgctgggattacaggcatgagccatggcacctagctggacgtttctaacattcatgtgattgatggcgctgctttgagttcctgaggacagcatggctaacaatttaccaggcacatttagagggacaccttcattgggtattgcttccaacatcaatgtgctctgcttctaagaaagtcaagagataaggtggtttagaggggaagattataggagttttatcttcaatgtgttcgcttttagctgatcaacacccaaggaagataacagtaattcaaaaccattaattgggttctgactcctttgtgaatctgatggaaggtaaaatttttcccaagaaaaatgcacatacacatctacatacaacactttgcactcaaatccagggagctaacacagccttgaaacccatccttggaacccacaaacctcagtttgagaactctaatcctggtagatggttcctgatatgaaaatgacactttgaagtttaataatttctttataaactggcaccttaggaaaaggcataaacacttatttcgaaacaggctgaacaatcaaaatattttttaaaatagggagatatctacctcagcttaggaaataatgaaaaggtgtcatctatttctattattcacttactcattcaataaatatttaccagatgatgtgcccagcactcttccaatagctatatatgcaagaatgaactaaacacacaaagtcccagccctcccaagacttatattttgtagggtgagctggacaataaataagtgcacaagtggtaattataggtgttgtgaagaaaattacattggggtaaggaggagaggtactgttagagatggagtgcaagttatataggatggtcagggaaggactaacagataaaacaggcttgaatccagaccggaagttaattaagacgcaagccttgcgtgtatctgtgggaacctccaggcagaggaaattgcaaaagtttttgttgttgttgttgtttgagacagaatcttgctctgttgcccaatgtagtgccagaatctcagctcactgcaacctccgactccaggtttaagtgattctcctgcctcagcctcctgagtagctgggattacacatgcttgccaccgtgcccagctactttttgtatttttagcagagatgaagtttcatcatgttggccaggctggtctcaaattcctgacctcaggtgatccacccacctcagtctcccaaagtgctggaattacaggtgcgagccaccaggcccacccataaacgtttaggccatgaaacaatgagtgacaataaagagaagcactataaagaccaagccctggaccacgccaacatatagggtcagggtaataagaaaaatctattaaaggagaaagaaactgaggagccactgaggtagcaggaaaacagagagtggtatccgggaagccaactgcataaagtgttcaaagaaagaaggaattgctgggtgtggtggttcacgcctgtaatcctagcactttgggaggccgacatgggcagatcacctgaggtctgcacttcgagaccagcctaaccaacatggagaaaacctgtctctactaaaaatacaaaattagctgggcgtggaggtgcacgcctgtaatatacaaactggcaccttaagaaaaggtataaacccataatcgcttgagcccaggaggcagaggttgcagtgagcctagatcacaccattgcactctagcctgggcaacaagagcgaaactctgtcagaaagaaagaaaggaagaaagaaagaatcatcaactaatcaaatgccatgatcaaatgtaagatgaggattaagaattgactgagcaacaggagtataaaatcactggtgaccttgaccttataagagtggttgggagtagagaaatcctgaatggaataagttcaataaggaacgagaagagaagaattagagcagcaaatatagacaagtcattcaagaagttttgctataaaaagaaatagcaaaatgagacaaattaggagatcttacagcatgcttacacactgattagaatgatccagtagggaggaaaaatttgtatggaaggggagaaaagtgacaattactgaaaaatgttcttgagtagagattgatttttgaataacaaggcttctgggtactcacataatctaggccacatggaacactcacagaaaacaatctccactaaagaggagcttaaagtcaaaagttacaagccacaccaaaaacaaatcctcgtacagagaaaacggggaatagagaggtgttgatcaaagggtacaaaaagttccagttaaacaagaggagtaagttttagcaatctattgcacagtgtggtaaccgtagttaataataatgcatacctcgggccgggcgcggtggcttacacctgtaatcccaacactttgggaggctgaggcgggcggatcacaaggtcaggagatcaagaccatcctggctaacatggtgaaaccccatctctactaaaaatacaaaatattagccaggcgtggtggcaggtgcctgtagtcccagcaactctagaggctgaggtaggagaatggcatgaacccaggaggcggagcttgcagtgaaccgagattgcgccactgcactccagcctgggggacacagagagactccgtctcaaaacaaacaaacaaacaaacaaacaaacaaagtatatttcaaaatcactaaaagagtagatcttaaatgttctcaccataaaaaataagtaggtgaggtgatgaatgtattaacttgatttaaacttttacaatgtatacctatgtcaaaacgtcacattataccccataaatatataattattattcatgaattaaaactaaaaataaatttttaaaaatctattataaatgaaaatcactagttactaaaaaaatgaaagcacatgcactccaaaattcagagataatagagcaatctgaaagatattttaaaataaaaattctgagttgttcgaagaggtttaaaaaaaagtaaaagcaatagagcaaaagaaccttgtgggaaaaaaagaagaaagaaagaaaggatgaaaggtgggagggagaaaacaaaataaaactgcaggatcaagtctatttcttacaaactaaaagatattaactttttggctgggcccagtggttcacgcctgttaatcccagcactgtgggaggccaaggtgggtggatcatgaggtcaagagattgagaccatcctggccaacatagtgaaaccccatctctaccgaaaacacaaaaattacctgggcgtggtggtgtgcgcctgtagtcccagctactcaggaggctgaggcaggagaatagcttgaacccgggaggcagaggttgtagtgagctgagatcgtgtcattgcattccagcctggcaacagcaagcctccgtctcaaaaaaatatataaaataaaaaaataaaaaagatattaacttttttaattagggaaaaaaatagtctaacattgatgagagtcagacatggcaaatatctttgttcccattgtagagataagaaaatcgagatccagagtgtgtaagagcgtaactgaaagctgcagacattgttactgaggctgaatttaaactctgctttttctgactgcagatcccatactctgccctctgtctgctgcatttgtcccaggataaagtagggctaacaggacaagctgttcaaagaaattgtataaggtttgggcaaactatcatgggagatactgtgagaacttgaaatgaatatattgatgaagttaaattacatgagattgttgtgggccagatcagttatttcaacaaaaattccctggaactgaggagcagaaagattcggattgactcaaggtgaaaggaacctgggcatcaatggaggatatcagtgtaagctgtgtggaaatggcttaccacacggacaaggaagggagaccagaacagaaaccactcccgacaccctccctctgccatcaagatgtagtttgtatcctgttgacttcaatagagcaaagagtgatttaactcatggcagaaggaaactgaattgtcttttaaggactattgagagaacagagaattaaacaagatggtaactgcttttctctagttaggagaaatactaacatacatcacgttttatgtgggatgtcctagaggagatctttaaggtgttcaagaggccaggcgtggtggctcacgcctgtaatcccagcactttggaatcacaaggtcaggtgttcgagaccagcctggccaacatagtgaaaccccatctgtaccaaaaatacaaaaaataagccaggcatggtggcaggcgcctgtaatctcagctactcaggaggctgaggcaggagaatcacttgaacctgggaaggcagaggttgcagtgagccgagatagtgctactgcactccagcccgggtgacagtgtgagactctgtctcaaaaaaaaaaaaaaaaaagatgttcaagaaggttcaggtggggctaggaaatgacttcctatagtgcctacaagtgacacacagggccagaagcctggattagccctaaagtgcataccttaaaaaagtatatatggtggataaatcctgatgcatctctcaccaaatgaaatttttccctgaggccgtaaaatgtctttagacaaggtattctcaatctgagacttcaggatttcaatgactaactccccagtatgcaagtgtttgtaggtatgggtatttttctcaaatttaaaaagtcattccatgcttaggcagacccctttgagcttttgaatccatgggcctggagacacgacaaagaagttaagcttcactggtattgaatacaacggactggccagctccttagtttgcacatatgttgaacaggcttgagtcaggatatagaaggtgccataagggaacgtgaggaggcccacaccatggagcagttaaaagtgagggcctgggccgggtgcagtgactcacgcctgtaatcctagcactttgggaggctgaggcgggcggatcacaaggtcaggagtttgagaccagcctgaccaacatggtgaaatcccgtctctactaaaaatacaaaaattagccgggtgcagtggcacacgcctgtaatcccagctactcgggaggctgaggcaggagaatcgcttgaacccgggagatggacgttgcagtgagccaagactgcgccactgcactccagcctgggtgacagagcgagactctgtgtctcaaaaaaaaaaaaagtgaggtccttacattttcacttattcaacatattgagacatactgaagttagtatgtgcaggaatcagtggatttatggattatattacctagttttaactaaactaaccctagcaaaatgtttcttaacatttaactaaccctagtttaaagtttcttaacaaaataatctcagtttgaagataacagtaataatgcaggcacatgtaaacagcaataaaatagcatagttacacttctaacttgagtccttttgcagatacattggaaggtaatgataatgccaatgaatcagatccgaccaaagccaagcaaaataatttcaaatattaagaaatctactagaaatgtgcgtttatggccgggcacggtggctgaagcctgtaatcccagcactttgggaggccgaggcagcagatcacctgaggttgggagttcgaagccagcctggccaacatagagaaaccatgtctctactaaaaatacaaaaattagctgggtgtggtggcgcatgcctataatcccagctacttgggaggctgaggcaggagaatagcttgaacccaggagacagaggttgcagtgagccaagatcatgccattgcactccagcctgggcaacaggagtgaaactccatctcaaaaaaaaaaaaaaaaaaagaaaagaaatgtgcatttatatctctatcactatactgaatggcaccttaacaagatgtatatttatgtgtatatttacactgagtttgtaaattagattttaaatgtttaaatatatatttatacacacactaagtttaaatacgtgtgtatatatttgtacctttatataagtatatataaatatatatgcatgtatgtgtgatgtatatatatttatgcatgttatggactcagaagttatatatatacagattatatatacagataatacatatacacagatactaatatatgcatatatattatatatatagaacatgaaggaaattcaacaaagtttaaagtcatattctatcaagtactttatgaaacttcattaaatcaaatggaaactggtggcctcttttgaggttctcatacatgaaaatcaatacacaaaatattccgtataaaaagttttgtgcttttcattttaagcccatcggtaaaaattatgaaaatgtaatgtctcttccaattagtttgcaagagctactgactcacatcagtgactatggaaattagtagccacatttcatcaaaattttttgcttaattaccagatggcattgaaaaacaaatatcattcttagtatctgctgccaatgatgtactttatccatttggaggtttggggaggtttcttttttcacttttgacaaccattataactaagtgtcaaaaataaactgaatttagaacccgactttaaaactcctgtatcacagagtattaaagatttgctcaaataatgaggtgtattatatttctggtgagaactttattcaataaataagatacatattttaaaatattatttttccatttttaccatagactttttaactttcaattttgaatatgttttataatgtacaacatgtaggcaaaataatacctgtatatattatttatgaataaatacatatacaaacagtggctacatagtctcaaaatacttttactagaaaagaatgattgatcaaaaaagtgtagatctccctgttctagatctgggagcttcttaaactgggctgcagatcagactcacatggagggcatgttaattccacattattttgacttctttcctgaatcagattatctgagaggtagagcctggaagtatgattttttaacaacttccaaagtgatgcttttggcactgatctgtgagtggcattcaaatccatgttcataaataattgtctattaattcaaacttcaggacacaaacagatgttagttgccaaaacttatgtgggcaagaaggataataatacagggagtaatacaattaactggcaatcaggaggcctttggaagaagttaaaacagaactaggtttctgggctggtttttatccaggaactcctaacataaatatccccaatataataatatattacagccatctttatgcatctcaattctcccattagtaaaatgagagataaaaatgccacctaatgcttaggactgttaagagaattaaatgagacaatatatgtaaaatacctagaacagtgccttggcacacagcaaaatctagctgttattgagatatcgtaatttgtatgtatcacgtgttttaggataggtgattcctagaaagaatagtaataaaaaattatttgtactgagcataaattattaccagggcatggtggtgcacacctgtggaccctgctacttgggaggctgaggtgggagggtcacttaagccttggaggttgaggttacagtgagccatgatctcaccaccacactccaacctaggtgccgaagctcaaaaaaaagaactgagcaaaaatattaccatactgttttttttgccacagtatttcaacagtatccagatatcccagaagaaagaaaaaagctgtaatgatcagaaacatgataaaagtctcaactaaatgaatttaattatgtaaattgtaagacattctgtaatactgtaataaatatcatatttttacctaaaaattaaaacccaaaggaattctgtgactgtggcctcatagagatagctaactaccattaatgtagttttgtgtgttaggccaatgtttactgttttattttattttgttttgttttgtttctgtctttttagagtcctgcatgtgcctctgagcttaatctctgttctggtaagatgtcaagattctggcctcctctaccaagaaggaggtcagggcttcagtcacagagcttcaccaccaaatgctgagacatcatctcccagtgaagactctatgttgatctcccttttgagcttcagttcctgccagaaaaagagctgcagccttcagatgcagatttgggaagcttctgaagtctttaggcttctttatctcattagccagggatcctttaaaacttagggagttctacacaggtgacaatcttagagcgattgtggaagaggccccatgtccctttaaaccttccaccacccagaattcttcttcggtcctcctaaatgtctcactttgaccccttgttagctgaattctgatttttgtacggtcacttgatgctgcccgtggcctccttcacattcaggtgcctgactccttgctggactgatggccctgctgactttgggcagtcagactttgcccttgctgggtctgtgacatctatctcaccttgaaagccaggactcctgaaaatcccatcagcactgagcagtgggaagccccatctgtccctgctacctgctgctggggatggctagacgcctgcccacgttgagattttctctgcatttggtttttcagactgaacctttctccttctaacagaagcttccaggagcatgtggtggctcctgaaggtctcacagatcaattttaaaaagcaagctttttcttcccctggagaaacagcaagattggtgacacgtctgtcactgctaattagcacaaagggtctgaacactggggaacacagagagagaagatgattggaattaaccagacaccagggttgaaaaaaaatccataatgtggtggtgctcagagaacggaaagaaaataaagttaatcagcagcagtggtctgctgtagagtcttgaggagggccactgcagagtgcctcgggttgcccgtggagatacgaagaagcagcagcatgtagccaaggcaccaaacagaaaccccatcttggaagaggctggttacccggaattaagcaaggaatgcattcatttaagcttacagggttctatccaagatcagttctcttctctgagattgatgtggacccttccaaccagaagttggaaactggcagcatgtattttctttggcaagcacagttttaaaaatttacttgaactggaatgccttttagtggtgcatgcaatttgcagtgagtcataagtctgaccatcccattattactactattattattattattcagagatgggggtctagctacgttgcccaggctaggcttgaattcttgggctcaagggatcctcacgcctcagcctgtcaagtagctaggactacaggctcaagccaccatgcccagctttgaccatccctttagatcatgttcctttaacatacttacagtaccatctggaccctgaaggtatttgagcaagtttgcgctcaaatattctccagaaggcagaggagtcaaggttaatgatgctcccctcagagtctgagctgtagagcctgctggggatgtctgaagactttgctggtcagagggcctagaagctgactactgaagattgggcagggcactgcccttgccaaatcccttatcccacagttcacttgatacttacttaatcagtctgtggcctccaccagatggtaggccactaggaactgttgttccccacaagatccttattattcagggaactcccaaaagagaaataggaaggaatttggtcaaggtcaacagataagaatttagtctaggtctactgtaactatatcccaaaaaccaaaatttagataccatggtccaaaattcggagcatagcatttacaattgtgacaccctggcaaattcctgacttacgggcacaggctatacagatatcagccagtgttcactggaggaaatgaagggaagaaaggaactcaaatctcaagccctgtctaggagaaggaggcaagtcttcagggttatactcacttataaactggaatctggcctttttcccagtgaagaatccactgaattatcttagctttccttcacatacctgaaaacagatatattcgaggagacatgggttggtgtagacaattttttttttttgccatccttttatccctacatggctgcttctagaactgcctgctccactcagggttccaggaggacagccttgggttcaaggcagagacgttcttttattccaaattgtatcatttggacctctagaaaacagggtcctatggtcctccatgatcaatttccacccatctctgtgccatacattcccgagctttttttttttttttctttttcttttttcgagacagagtcttgctctgtcacccaggctggagcgcagtggcatgatcttggctcattgcaacctccgcctcccagattcaagcaattctcctgcctcagcctctcaagtagctgggattacaggcgcccgtcaccatgctcggctaatttttgtattcttggtagagacaaggtttcaccacgttggccaggctggtgtcgaacccctgaccttaagtgatccacccgcctcagcctcccaaagtgctggaattacaggcgtgagccaccgcgcctggccattcctgagcttttaaatcatccctccttgctcctgcctgcgtgagacgtaaaagaaacaacaaataccctaactttgcttcttgaaaaaccacttaaaatacaccaaatgatctattaacatatattcctagaattccaacatacagatttgtgagatggtagaaaaaagtgcctaaaatatggcttatctatgtaatattagcagatggtagtttagaaaagactacaggaacatcaccttttccttgactgcacatgtggcttggatataacagaccaaaacaggggtgaaagctttattgtggtgcctgtcgagaatagattagaatagacagtaatggagaggacagtttcacaagactttattctcaggcttaattagaaccaataaaaacttataagtaaaaaaaaaaagtactatcaatgaatttcactgtataaatatagtatgaaatgtttactaaatgaacaggatttttcatttatatatcttgtaattcttcgctattctagttgaatctgagccaagaatagaaactcagtacatttattttctggtgacttaaagagaaaaaaggaaaagttttgtgtaagtaaaatagaatgtatttacaagaacagactgcttttctttaaaactgcttccaaaacatttgtttctgaacttttttttttttttccagatggagtcttgctctctcgccagtctggagtgcagtggcgcaatcttggctcactgcaacctctgtctcccgggttcaagagattctcctgcctcagcctcccaagtagctgggactacaggcgcccgtcaccacgcccagctaatttttttgtatttttagtagaaacggggtttcagcatgttggccaggatggtctcgatctcttgacctcgtgatccacccacctcaccctcccaaagtgctgggattacaggcgtgagccactgcgccccgccggtcttttattttttaaacacttactatgccatgaattcatagggaatatgttccagcacctcaggcttcttcctactggttctcacgaagtgtgcttttctgggcagtgcaggctggcacttcagttgaaccccaggtacttttctctttgtcttctttagttttctgataattttccttcacttgtttcaggaagctatcttggctcttcacgtgcttaacatgcccaatacacacattaattctcttggcaagaatcttgcccttaacttgtttgtttacaacaaatgccaacagcatgctggggaacattgtagactcttccagtttagccatggtgacacctgtggggcattcctttttgaacagtactcattcccttgatgtctataatatcacctttcttctagattcgcctgtgcacggccaaaggaacaactccatgttttctaaaactcctggagaacatatatcgggtgcctctcctctttcactttgtgttcatcattttggtgaattactggaagatggcggttcccctgaatcatattttgaatgaaactttaaaagaatataaatgtatggtaataaatatttgctgtttcataagaatgtttatttaacaacaaaagaaaggacatccatcatcctgatttagttccatcatttttattattatttttttttgagacagaatctcattctgtcgcctaggctggagtgcagtggtgcgatctcagctcactgcaacctctgacttccgggttcaagcgattctcttgcctcagcctcccaagtagttggggctacaggcacccgccaccacacccaggtaatttttgtgtttttagtagagatggggtttcaccatgttgaccaagatggtctcgatctcctgacctcatgatctgcccacctcagcctcccaacatgctaggattacaggtgtgagccaccatgcccagccaaatgttcttaatttttttttttttttttttttttgagacggagtctagttctgtcgcccaggctggagtgcagtggcacgatcttggctcacttccacctctgcctcccaagttcaagtgattctcctgcctcagcctcctgagtagctgggattacaggcatgcaccaccacatccagctaatttttgtatttttagtagagatgggatttcaccacattggccagggtggtcttgaactcctgacctcgtgatctgcccacctcagcctcccaaagtgctgggattacaagtgtgagccactgcgcccagcagttacatcttaattcattaattttcattagctattatgttcatgacatttacagtccataagctaccaaagaatatataatgtaaagtgtccctctcaatcctgtccaccaatcacccagtttctctcttgagacaccaaaattttcattattttcagtatctttccaaataaatttaaaacaagtaactaaatattacatatacatttctccttctttaaaacaaatagtagcaaaccatggtgttcttcatctggctttttaaaagataacaatatatattgatagtcatcccatatcactacacaaagagcttcctcttcttacagctgggtagtattcgctccatgtttattcagttgcctgttaaaggacatttaagttgattctaatattttgctacaaaaatactatattcagtaaccttggacatatatcattttgcaaacgtgagaatatctgtaagaatacacgtctagaggtataatttctgggttaaagggtatatacatttttaattttgatagccattattaacttgtcccccattgagctgtgccaatgtacattcccaccagctatgtagaagaatgccagttgcccacactttcatcaatatattgtgttattaaacttcatctgctagataactgagaaattatatctcaatgtggttttaatttacatctttttttttagacaaatcttcctctgtggcccagactggagtgcaatggcatgatcacagctcactgcagctttgacgtcctgggctcaagtgatcctcctgccttggtctcccaaagtgttgggattataggtgtgagtcaatgtgcctgtccgcatcttcgcatttttaaagagacatttatattccttttctgtgatccacttgttaattttcttggcctaattttctattaggttgttgttctttttcatgttgatttgtaggaatttttttttttttttgagacagagtcttgatctgtcaccaggctggagtgcagtggcgcgatctcggctcactgcaacctccgcctcctggattcaagtgattctcctgcctcagcctcccaagtagctgggactacaggcatgtgccaccatgcccggctaatttttgtgtttttagtagaaatggggtttcaccgtgttagctgggagggtctccatctcttgacatcgtgatccacccacctgcgcctcccaaagtgctgggattacaggcgtgagccactgtgcctggccaatttataggaaatttttattagtgaaattaatcctttatccatgttataaattgaaacattttcccagttagcagtttgtcttttgactttgcttattgtgttttttgctaagagaattttttagaaatttcatcttttgacttgtgtcgttcttagaaatgatgggcttatcttatatcttcatggtttcttattttttctttaatactaagatttttgatccatttggaactcatctagatttaaagtttgagctatggattcaagttcactttttagcaaatttctacctttatttgagatctcacctttaattatactatattctcaaaagtatttgagtctatttctagtcttcctaattagttttgtcacctaatttaggttttttcattcttatgacatttctctcctgctcattaacatttttttgttgggtattctttattttgctattaattccaaatgtcaggtaacttaattcttttcaacattctaaaaacagagaatttcctatgtgtctaacaataatttttcaattattctatattgctgataaagtgcttcatcaactactaacagaatttagttgctgatatctgatggttagagtaagacaacaaacctgtatggaacaatttggaaaagagtaaggctttcttgagctttgattggttgaatttgatgtgctgggaccaaaagtgactgacagatggtcacgagagttcatgttttggtaactcctcttgaaatgaacatatatttcatttttagtttataagaaatataatgtcggccaatgtcctcttcattggatattgtagatgaaatgcctcaaaacataatgttgttcactagggtggctataatagaaaagccagataataacaagtgctggtgaaattgtggagaaattgaaaccctcatactcttagtgggaatctgaaatgatgcagcaactttaaaaagtctagtagttcctcaaatggttaaacatagagctaccataagattcatcagttccactcctatgtatatacacaagagatctgaaaatatatgtccacaggaaaacttgtacaaatgctcattgcagcattattcctaatagccaaaaagtggaagtgacccaaaatgtccatcaatagacaaatggataaacaaaatgtgatatatccatacaatataatattatccagtcataaaaaggaatgaaacattgatacatggtacaacatagatgaacgttaaaagcattatggtaagtgaaagaagttagatacgtattgtgtgaccacgtactgtatgattccatttgtatgaaatgtccagaattggcaaatatatagagacataaagtagatttgtagttgctgaaagctaggggtaggggcagttggagtccaatggggagcaactgcaaagggtataaagtttcctttcgggatgataaaagtgtcctaaatttgatcgttgtgatggttgcacaactgtgaatgtacaaaaaccactgaattggccgggcgcggtggcttacacctgtaataccagcactttgggaggccgaggcaggcggatcacaaagtcaggagatcgagaccatcctggctaacacggtgaaaccgtctctactaaaaatacaaaaaattagccaggcatggtggcgggtgcctgtagtcccagctactcgggaggctgatgcaggagaacggcgtgaacccggaaggcagagcttgcagtgagccgagatcaagccgctgcactccagcctgggcaacagagcaagactccatctcaaaaaaaacaaaaaaaaccccactgaattatatactataagtaggtgaattatatggtatatgaattatagcttcataaaacttaaacacaatgaaacaaaacagtattattaaattcaaacccaatattgttacctaatctcaaaagcaaaaccaaacccacaatgccctcccccaactaattattaaattccacaatcttgagttagccagagatgcttgttgtggtctcacataagaccacatttgatacatgcctttgcatgtgaggccctttcttggctacgccctaggtgattcctttcttttagatacatttcaataagtcattatttttatcagaacctacccagtaagattatattagttggacaaattcagacttagttgttagaagttacagtacttggtttgttattttgttctagcgagtaatacaatttagcaaaatgtttaacttctgtgtgacatttttagttttgttatgttttttatattccctaatattttattttaaaaaatttcagacacacagtggaaaaaattgtagttagtagcagtctatccaccacctagatgtcactattaacattttattatgcttgttttagcatatctctatccatctttctatccctctcgcctatcattcaaccattttttcaaagtaaattgcagatatcagcattatgtcctgttaaatactgcaggactcctataattagctagagttttatatttgtattcctttttttttttgagacagagtctttctctgtcactcaggctggagtccagcagcgcgatctcggctcactgcaacccctggctcccgggttcaagcaattctcttggtactcagccttctgagtagccgggactataggcatgcgccaccacacccagctaatttttgtatctttagtagagacagggtttcgccatgttggccaggctggtctcaaacacctgacctcaagtaatctgtctgccttggcctcccaaagcgctgggattataggcgtgaaccaccacactcagcctgatatttgtttacaggtttttcttttgatgtaaaatttacatacaatgaaatgcacaaatctttagcatatatttgctgcattttgacaagtgcttacccttgtgtgacccaaactcttatcaaggtatagaatatgaccgttaccccagaaagttcctttttctccttcccagttaatcttcaagcttccttccctgtattttacttgtttatttctttttattattattatttcaaattatttatttattttttgagatggaatctccctttgtctcccaggctggagagcagtggcacgatcttggctcactgcaacctccgcctcctgggttcaagtgattctcctgcctcagcctcctgagtcgctgggattacaggcatgcgccaccatgctcggctaatttttgtcttcttagtagagatggggtttcgcgatgttgcccaccttggttttgaactcctgacctcaggtgatccacccaccttggcctcccaaagtgctagaattacaggcatgagccactgtgcccagtcctttttttttttgttccagtgaagttagagcaacagaatacagagtatgtggacaggttgtgggtgtagttcttgcagaatagaatcctatacttccgtaatatgtttgtatttggtcagaccatggtattcactagcataaatggtagcatggtattcaccttttgtaatgacttagagtgaggtatttccattcttttactcttataaataatgttgtcatgaacattttcttataaatctttatacatatgcatgattattaatagtcaaaatagtaatattggccaggtgcggtggctcacgtctgtaattccagcactttgggagaccaaggcgggtggaccaccagaggccaggagttcaagacaagcctgggcaacatggtgaaaccccatctctactaaaattacaaaaaattagctgggcatggtgatgtgcgcctgtagtgccatctgcttgggaggctaagccatgagaataacgtgaacctggaggtaggggttgtagtgagctgagatcatgccactgtactccagcctgggcaacagagcaagactctgtctcaaaaaaaaaaattagtaacatcttcttttatctgaaccagatgaaactttggttctttaatggcatgaactggtcaaagtttctcacaggccctgtatttccaattaaattcagtgctcgaatgacatccagaaacctgcacagcttgcagctctctgcctgaagaggcaacatccgtcactgggtggcctggtcctgagcccttggcaatttgagggtgggcgttttgctcaaagacaattgctaaggctatatggaatatctggtgactgttccatccaaatagaggtgtctgaccttgtttctttcccagaggctgaaattggggtcctaaggtgaaatccagttgtaaattactttttctttatttggaatgtgaaatgaaaaatgtattcttgaggctgggtgcagtggctcacccttgtaatcccagcattttgggaggctgaggcaggcagatcacctaaggtcgggagttcgagaccagcctgaacaatatggtgaaaccccgtctctactaaaagtaaaaaattaaccaggtgtggtggcacatgcctgtaatcccagctactcgggaggctgaggcaggagaatcacttgtgcccaggaagcggaggttgcagtgagccgagatcgcgccattgcactccagcctgggcaacaagagcgaaacaccatctcaaaaaaaaaaaaaaatgtatttttagtctaaccattgacatatgtatcataaaaaacaagcaagctagatttctcaacaaaggttctctaagcaaggaatacacagacgttactctttctctgcagcctctttcaggatgggggactttgatattgccatacattcctcttagaaatcatcttaatttgttattttcatctactctagtgggaagataaaatcactacatggcagagccaggagtttcaggcccatttggggatttcctcaaggatatcttataaatgtaaatttgctggttattcatatgtattgcttaattgccttcccgtctccccagtgattatgccagctaccaccattattactaaaaaggttaactttttttaagcaattcatttttctgaactgtgtattagtttgctaagggatgtcatagcaaaagaaccaataaacaacataaatgtattttctcacagttatggaggctggaagtccaaggtgtaggcagagttggtgtcttttgaggacacactctgtggcttgtagatgatcatcttctcctagctctgtgtgtctgcatcctaatctctttataaagacaccagtcctattggattagggcccactcgtatgacctcattttactttaaagaccctatttccaaatatagtcccattctgagatgctgggggttaggactccaacatgtaaatttggtgagggagcagaatacaatttagtccataagaaatcataaaacacaaatatgtaagagaaatgtgagcataagaaaaagttaaaaagctcatacatagcttcctcagttggaacaaatcaaagtgctttcttgtttttgccatatgcacatctaattattggctcttactagtttacaataccaacagcaatgcaagtatatgtcagttttatcacaaactcagaattaggtattcttaaaaataagattagttatatttttattgtatttctcttttaattcagtttcccaatttcccttaatgaatttgctaggttgaaggttttcctatatatatataaatataactatatatatacatattttttttaatagatggagtcttgctctgtcacccaggctggagtgcagtggcacaatctcggctcactgcaacctctgcctcccaggttcaagcgattctcctgcctcagcctccctagtagctgggattataggtacctgccaccacaccggctaatttttgtttttttctgtatttttagtagagacagggtttcaccacgttggccaggctggtcactaactcctgacctcacgtaatccacccgccttggcctcccaaagtgctgggattacaggtgtgagccaacatccccagccttctttaatatatgttatttataatattggatgtgtgtgtgtgtgtgtgtgtgtgtgtgtgtgtgtgtgtgtgtttaaattaattttctagtagttgcctaatctgtagtgctgcttctaggatttctattaaaagaatatatattaaattcttattaaaggccagttatgatggctcataattaagatgccctaggagcaacaagagctgggtgggctactgatttccagatgggaatctggccatgtttataagacctggacttgaagatattgggcagccaacgaggcccatggaggagaattctggcgggctctccactgaagtacacctacctgctctcaccttcaatttgcctttaatgcctctccacttgatgtttacggctagccacttttaggatctgagccatcaagatgatggatgaaattgggtttggaacaagaaggcagggctattttgacccaggacacatttccaacatgctgtgaagaactctcagcatcaaataacatctgggtggaagaagttttgggaaagaagtctagctgtagatcacacaatgcttctaaatgggagaaaatgtccagctccatggcttagattctttgggaagtaggataactggctattccattttaggcaaggctgcctggccagaaacccatgtcttaccatttcgagtacattatggttggcttacaaatcgtagcctcatagagaactttttcttcttttagctactgtcttcctaaaataaaagtctctgtgcaaagcaatggaagaaacctcatattgttttttggggttgtcattttatgtaacttacaataatgactacggctcgtcttatacaagatgtaaaggatttgggagagggaatccagtgtgcatttaggggaagatggtgatgtagatagcatatttcaggaggctgggaagtgtcgagtgcttaaatatatgcttctcaaatttaatgggcatacaaattacctggtggtattattaaaatgtaacctctaattcagtagttttgggatgggtccatggacagcactttggttagttccccttgggactcccctttcccctcagagaagtgtagagggttggggtattgggcttaagaggagttccagactgtaaccatagctctaggtaactcccttctggaagtgatgtgttagcgactggaggagaaagggatccctgggatccttttcagctttactattctgatttggggttctgagattccaacaaagtggacttttgggagtcacagacctccatgggaatgatgaaagctgcgtaccttctttccgcacaaatgcaggcccacctttaattctgcaaaccactttaggccccgcgggcccgcagccctggtccaagacagctgtctgcttcacaggtcgcgcacccagagccgggcggttctgcagctcagcatctggcccgggctgcgcgtcgggctctggcgggggcgtgtcaggaggcgtgtccggggcgtgtcggaggcggggccaaggcgggggtaagcctcgcccctcggccgtgcgagaggccgagcttgctgcattgcagccgccgcggcgccgctcggctcttcactcccaacaatggcggctccgagcccgagcggcggcggcggctccgggggcggcagcggcagcggcacccccggccccgtagggtccccggcgccaggccacccggccgtcagcagcatgcagggtaaggaacgcggccgcgccgagatcccagccccctagcgcggcaacccgcgtcgtcgcggcctgccccagcggacgcccccggacccggctgaggaagccacggcagccgccggcttctccctctctccctccccggcttcccgccccgctcccggccgcctccggcccggcttggatccgggctccggcccgcataggccccggccgcggcctctgcctgcgcttggcccctgggccctaccgggctctcagcaggcccgcagggcccacctggtccgggaccgcccccgcggccgtccccatcgcccccgccgcttacctggcgcccgcccggcccccgtttccgggaacgcgccggctcggggctgcggcggagcgggaggggcgtcgggcctgccccctggtccctgacgccgctcaggtaggcggcgaagacagcggccccggccggcgcccctcggccccgccgccgcagtgggccccgctcagggccatcttggctgtcgccgggcacagctggagccggaccaccgagctgacctcgggctacgggggcctcttggaacctgcgttttcaaacttttgcagggtttctgtgcgctggaagggatgggggtggggggcgggttgcccaggcctgtgccacctgtaaggtaggtaggctgcattggcctgggagaggcattttgttccaggccagggatttctgtgttagcattgcgtgcaggaagaaaaaaaaaaaaaaaaaaaaagaagacttaatttggtttaaatggagagatacaggaaatagacaggggtcaaagtgatactgtagtgtctggacatttgaggcagctctgctaattaatgactttccccactgggaatgcttattagctgtgtatggcttttgacagggggtgttgtgaaaataccaggccaggcccgagcctgttagggaccatttccttaaatttactggggaattttgagtagtaatgctatttttaaaacagggaatctcagaactctcttgacaactttagcaaactgcttgtgttgaattattaacagaataagggttggggtacccttggtagtcagtgtgaccatggttactttttgattccattcctcttaaagggcttctagcatttagttaggttcaacagacatttattgaatagttcatgtttatagagcatgccataattcagaaagaagagacaggattttatttatctttacatccctgtcaccctccccatgaaataattttaatatacataaaaaccagtgatagatatatagacaggatgatgtcagagcttagaggacactttctgtgcaggccctcagataattcattcaaattgaattagttattggatgcccactgtgttgcacagcacattatactgatgaagtataagattgacttcctgactgtacagctttacaatttaggtggtggtggttggggcgaaatgaaatggcaaaatgacaatttaggattgtatttcttgttccagatgggtgacttacaaagcttataaaaacaaggtgatttgtttgtttgttttattggtggggaggctgacagtttgaaatagctggatacagtgtgtttttttggttcaaaaaatatttattgagcatctgcataaaacgctcatgctgagtttatagagaattgaacatctctaactgtcctcatggaggttatccccctgtgaagatgggggagggaaggctatttagctaaacatgaaaaattactagttggaaaagtaataaaggtaacaagctgggttttgtgatagaagataatagagggcagtccgcttgataagatggtcagagaaggcttgtctggaaagctaaccctcttttacctgaagacggttctaggcagaggaactgtgtgtatgaaggttccaaagcagggaagagcttggagtgttctaggaactcctaaggcagtggttaggactttttctgatgctgtccgttctcctcagcccttgtatgttgatacccagttaactaaactttctaataagcagaacccattttagaaggaaaaaggacctaagacctctctatgaattattgccgaattttcttttttatcaatattgtgtctagtcttgattgattcaggaatgtgttatatcttgttcttgaaacttttttcattagtcagaatgaagtgcttgatattctcaggatgttgtctagaacagtctgttataaagcttgaacttaagcagcaatttaggatccttctttttggtttgttttgttctgtatcttaattgtgaggcccttgaagaggaaatcttataagaacccaaaaagaaagattcccatccaattgtatgggagtcacacctcccatactgtacttcatctgccaagggtcttcttttgctttagatcagacttcacagagtgggccttagaagatgtttgatgtacttccattccttctcccccaatctaattatacttgccactcaaaaaacttcctttctgggagttgttaatgaccatgctctctgaaacagcaggattcagttgtggaacataaggaatgtttcatgcagtagacattggacatcctcttatgtggtaagcactgtggtgggcactggataaccttgaatactttttcatggcttcatgtttatggcccaagagtggtccaggctggccaatattgctttcttaatatactgcttaagaaccagagctctggagttctgggtttgaatctcttggccaggattcagatatgcgttttgtgaccaggggcaatgaacttggcctttcgaagcctcagtttctcacttggaaagtgggaataacgcttacctccccggtggctttgagaatgcatgtaagcctgggacctgacatgtagtaaggatgcaatacacattagccatcattgttagtagcgacaatattgttatggtctcattaatggtcccttttactattggtaaatgagtccctaacctctcattatttaccacacaatttctttagttcatattactaggtcccactgttctctctaacctgttgatttccccacttttcattattgagcagtcctttcagagtatcctagatgagattttattctacttcaaactccggatctgtttttttctggatctgaggactctcaaatgaattacaatgtgaacgatatgaaacagaagtctagctatcaatttgctctactcatttttttcataggggatgggtagatggttggaatgggatttatagtgaatttgattataagagtaatcaacagacgtagctttggttgcatgtttatgctaacagttatggcttctaatctggccatttttgccactgtccctcagataatagggaatagctgctaattttgttattactcaaaagatttgagtgtcttcactcattctgactcatttttttttcatgttcattcacaaacacacccaacctttatacgttgagtagttcttaggctttggttctttgatgactaaagctaacaaaatgtagatctgtttgccaagttaggtaagtggttttatgaaagtatatttggcattaggatgagtttgcatttgagagaggaaacaatactcaaattaactactctgagaaatgtttttattcttaatgtttcatcaataatttgttaatgtagatagatttaataggaaaatttcttgcatattagggcctcattctgtggaaaagtattattctttagtccaagaaattttagccaacctaaagtacggaattgacttgtagcattcaagaaccttcctagccatggctagggctttcccttgtggcaaatctaaagcctcgtgactttagctgggttagtgtgaatcctgtaaagagaagatcccgttataccaggtaattaatcttagatatgtatagcaaatagtactagatagtatggttggcatgttagagaatagcatattctgattaatagagcttgccagttgagaattcaacagcttctataatgaaattgcataggcaggatgattccttttccagtagtagctgtagcagctagcgttcccatagcatgtagtaatgtttaagaaacaaaaggatgttgaagtgtaaagagcactggacttagactcagaaaaccatggttaaggtaactgctctgctgtttacaaacactgagattttagggaaattccctaacttttctcaactctctgttcagaaatttctcatctgttaaaatagggataatgcctaacctgtagggccattgtaagaatcacattcttaatgcatgtgaaagtgctttgaaaattatagaatatctataagtatatacagattgttattagacatgattatttgcctgctgtagctactaatcacttaaaatgtaatagatttcaaagatcgcttagctgagaaatgtcagttttcaatagatgttttcttaaaatggttagaatagaatctataattgattcagaaaaacattgagccatttgtaaaatacttgttacaagaaatagttagaaagtatatgttgtaggtgcctctgattctcttaaagttctgatttacagaaaactttgtgaccagtcgagtccttagctatttacccttagctgagcatttttatgtatcagtttaagtagaaagatgatagcttgattctgctttagaaaacacgcccagtactttaaaatgtaatgaagtatatctgttaagaaaaagtcaagagatttaaaatcaatgtagttatttctcccaaaaatatttgaatataaaatgtatatgaaatgtcctgcttttgattttgtttatctgtttttactaattagtctggttttcgagaaccatgggagacctttatcttaattttaaagaactgatttgtgcagacagtgaagagtttcaaaccccagaactgcttgcccttcccagtgtgttgcataacatttcttttactgtttaacataacctcatacaagttcacctcagcaaattagtcccccctcaaagctcagactgcatttcttcttatgttcccttaaaaattagagcaaccctagtattaaagtaaaaaagtggaaaaacatctcacctcacttttagaatacatattttctcacattttcctttaaaataccttactagcctgaatgtgtgctgaaacttgtttaagatgggatattagttaaccctgtattttgagtcgttttcttttttcgtaaatttttcttctttcactaatttgagaagctggattgatgtgagcccatagagtttccttatttttaggggtctggatatcataatcctaactccattctacataatcgaggtcagtctcctttgtagtctctaggaagtgcagatggctccaatgatacaacctgagaaactttaattgaggcttaaaaaagaaagggaaagtaacagttaacaacttttttcactgttcctacctaatttgatgctcacaaccaccctttaaaggtaagtggacatagtccccttcatagatgagggggtagacgtttatttgttccggaagaggtaggttttaaccacctgggtgactggtagcctttgctcctcttactactctactgcatggttctctgagcctctttaagtcatttcggccattcaggtctgaaggaagcatctttgccagaagtgatgcagattcaggaatggaggagagagattattttaggtttcagtcagggggcggaagctccaagcaaccagccaccttttgagatgattttggagccttggtgctccaagaatggtgcacttcatgttacaatgttctaaacttgctggagggtttacagtggcattttgaatctggagacatttcgattgggaatctccaagtaagtagaagactttaattagaggaaaccattgcagatttgaaaggtaatagaatccttttaacactatatataaaaggaactcatttgtcataaaatttaacaaatgttgtcgttctggctaaatttgtaatctgggcaaattactatttttgctagtggatgtgggttagcttctagctgtttcctcccaactctagaaaatcttcaggtgtctcttcatgctcggtaaggttgggagtttaatgtgtacttaaattaatagaaagtattcaagtcgtaagactggccttgcttgtagctacacagtgaaagggagatgattagccagtagtttacacaactcaaggtgggccttttgaatgaagaaaacaattacattgtatgcagcttggttctttaagaacaacacattattctccaccacggagaaagaggattaaaatggacatcacagcagctttttcgagctatattgtatttcattttacccaaaattgctcaaacattgaaaaacgaggaatcaagaaaagtgttgccagacatatatatctgaacatacacacacacacacagacaccaaattgttcaaacatttaaaaaaagaggaatcaagcaaagtgttaccagacatatatatctgagatatatatatgtcagatgtatatatatctgacatgcctatgtctatttattgcctggctttgctgaagaaatcagtgacattaaggagctcccctgatgattttggcagtttccctgggatctggttatgtgcctgtcatggggaagcatccatctttttggggttgttagagtcctcaggataccaggctgtgcctaggaagggttgtggcagaggtgtagagggtggggtgtggatctccagggctgtttggagtccttcccttttaattctctcaaggtgactgtgaatgaaaggagaaagactggttttgtgtaggttaagctggtctggtgagcaccagaaagatagggaaggtgccataatcgttgctcccatgagggagagaacaggaataatagtgcctgtgataataataacctgctttagtccaggcttttggttggacattttagatatattttcccatttaatcatcacaaagctcttttgggtattattttatttttcacaaatgaggaaattgaggctcatagaagttagatacttgcccgaaggaacataattgtaagttactgtctcagtgtactgtgcttcattaaacaggcttgagaaggtaatgtggcatttaattttgtggccaaagaataaataaggtggtcattgcccaaagagagaaaaagagctggcattatgaggacacttgaatttaaaaagtgtggaagggatttgatgagtattttatcaactcctgactggtggatgattctaacaacctggaattgctaacttagggtggctcccttttgatagtttcagaaagttgacataaggaaatctgaaagaaataaaccatcaggaaataaatcttggggaacttgctctgagtacaatgaaaatacaaatttagggtaggtttagataacgccttacatgttagagccataatgatatactatgggtagctgtggtttaaggcacatgccagaattttgaagttggaagtttgaaggtgtcagacaaatagacccttcatgcttgtgacagaggaaagactttgtagcacggtcttatgggcatgacccagtaaggcagctctgattttctttacattagtgtgggttcatattgtagttcataatgcactttcagcagtgcaaaaatccagaatgtccagggaatcagaagcaactactgaggagataggaaaccacttatgtccggccccacaccctctctgatttatattatcaacctagaggaatgggaatggagataactacaaaacctcataatggccattacacaagcaaaattagatttaggcacactgttttcaaacccttaagataatattctttatttaaaaatgacaaaactaggactcaagtgaaatgacttcagtttcacagttggaactagaactctggtctcctaacacacttcattttgttttttactttatcgaacaccatttgctttttgtttttataaacacttacacatcctaaacagccgcttacctcactgtatttggtaagaacagtaaattgtaggtttcaagttatggccacataaaagatcttaaaattgaggtaagagggtgagaatgaggggcaaatgtgggaacgagggtaggagatacgtagagagaaaaaggaggaggaaaaaccctcatgtagctttatttcttttataggcttactagcattctgtcctatgcattttgatattgattcatcagtgtcaagaattaagaatttaaattcttaaataaatattattcttgatatttattctaagatttaattaaacttgcctggggccaggaaaaatgaaaaagactcaaatttacccctacttgtaatggggaaaatataaatggaggatcatgtcaaattaagccccagggtacagatagttcacccagatataaaaaagtgaggcacacacgacttaaaatgtaaccagttaactatcaacaggttcaacggattatctagtacctccagagataggacttaaagtaagtgaataggaagtcagaatttcggagacaagggagacttcaaaaattgaacatattggccaggtgagatggctcatgcctataatcccataactttgggaggctgaggcaggaggattgtttgagactagcctgggcaacatgttgggactccatctctacaaaaacaaaaaacaaaaaactccaaaagttagccagacatagtggcttgcacctgctgagatgagaggattgcttgagcccaggagtttgaggctgcagtgagctatgatcatgccactgcactccagcatgagcgacagcaagaccctgtctctaaaaaaaaaaaagaaaaaaagaaaaattgaacatatgtgagtgaatactagtgaatattatatcataactaagaacttgcattttgtaaagttgaggatattggaagttttcctcatttttccttcccaccatctttctcttgtgcaagactgttgcttgtcccctttgcccatccttaccctttgagtatgagctagtggagctatttggtactttcccaaatctgcactataagcactaactttctgacttttgcaggtcttaaagatttagacagactaactaaaaacgcttcttccctaatttaataatgttaagaaagttacagaattgctaaagaaaaggtgagccagtgtgttccagttaatttagaccttgcttgtcagtggactctgggcgagttaccaagtattttcttagtgagaaataatgtggagagatggatgtttggatgagaccccagaattcgttcacctggtcacttcataattagatacaaagaacaagtctatacttatgctttgaacattttaatccccttcccacctcctttgtagctacttatatagattctgtactggtgacagaatttcaggttttgagaattttttaacacttaaactggcgcttagcttttaatgtgttagagcaatcattggcgacattctgtcattctcagtcacatataccttaaaatttttaatatattatacacttattaagcaatgtaactttttttaacacaaccttacatatagatccaactgatttctttttcatataccttacaaatttgttttcttgctcctttcgccatccatattactattttgttcacctcttctctctccttttcacctctttctttttgctacctagtaacagtcaatcagggtattttgctttaaagttgtttgtttcccagcctcctctccagttgtagtagaaggtgagttttaccttcccttttccagtgggatgcggggaagacttgcctgctacttccagagaacccttttcttcctgaatgtagtcagctcattttgcgtggtaggaggccagtggcttttagttgcttaggcttgtaagacccatacatctctgtttttctttctgaattctgttcccactgcacatttggtggggtagcatattgaccttcagtggtagagagaccagggtcagaccttctaggtttgccctagtacttctttcccatgaagtctccattctcacttcttcctgcattgtcatttctatgataaggtagtcagcagtggattacttcggtggtgcaccaaagacacttttcatgtcaaagtagctacattagcatttttcagtttttgtactttatagatggcatcttcttagaatcctaagaattttgataactggataggaaagactacttaactatcctttcttcagtcctggctcttttttctgcgtgttttgattgaatttgtttaaacacaaagttattgtaagcttacttccttcattttgttccccaaaacacaagcgtagatagaccactaacaaaaccagatatccatccactcactaaactaggggtgaaagaatattttgtgaaggcttttgttttaattggcttactttactggatgcatcttatcaaaaattatatctgtatacagtgtatacataaggtgtaaccagatccaactggatttgaaaatgtgtttaggtttctaaggggaattcacaggttttcttcttgtaacttctaaagtactcagctttctcattcctagggacactatcttattttttcaggcctattttagaagaatttcagcccctcttcagcagttcattgtcttattgtttgaagttagctaatttactaggaaatgttttatgtgtgtgtaagtttcacaatttatgaactgctaaaacttttgcatcatagatggtaattaatcatgggtaactctaaatcagtaatttaagttagttaagtaactcattctgtatttgtaggttgaaaacattgaaaaaatggacagaactatcttaaaggttactgttaacttctaagggcttgtagttctttttattaaatatatatgaaaaataaagattaagactgcaacacaatttaaacttgatttcagtttcatgtaatgtattacatctacatctgacagagctaagttttttaagaaagctcatgtgttattgtctctggtgggggtaatgtgatttgacctgttcttgaattagttttattcaaaatttaatataaaaatgcaatgtcatgttccaattttggtttgtttgatttacagtaaatgaactggaacttatcttttttactttaggctttcagataaacttctgtgaaaaggcacaaagtaagctacaaattttatgatattatgctatttatttttttcatatccatcttggtattgggaatgtgtccactattgtttcagctaaccagccatggcaattttacattcaaagagctaccatttttcattcttcttccaaatattaaaaaaattatattcttgattgtaaattgtacttttttcacttgaaattgaaatagcaaaatatgtataggtatttagatgtatataatatggaaatacgtatttaggtatagaaaagtatatataggtattcagacttaaccctaatttaaattacaagtagaagagaattcacttttaagatcgtggtgcagaaagtatagagttatattcagacatcttatgctttaagattgaattattataaaccatacattgaatatatttttaatttttttctttaaaacaaaacagtgtttttcttctgcctccctcaccatccttattctgtattaggacactagtcttcatataatacaaaacagactttctatatcaaaaaaaaagttataaaccttgtattttatttattgagacagggtcccactctgttgtccaggctggagtgcagtggtgcaatcatagttcactgcagccttgacctccctcaagcgatcctcctgtctcagcctcctgagtaactgggactgcaggtgcatgccaccatgcctgactgactttaaacttttttgtagagacagggtctcactttgttgcctaggctagtctcaaactcctgggctcaagagatcctcctttcttggcctcccaaaatgccaagattacaggtgtgagcgactgtacccggccaaaaaaaaaatgcatttaagcttaaatgtcatctgtatcaagtacagttaaaaaaatctcatctcaaggagactactctccagttaacataaaaatataccaaaatatgatataagtcgttttgtcttctgctttttattcatgaactggagaagaatgatgctttgatatgtgtcattcttaagtacattgattcaaaggcaaaaaaaattaacctggaaaaaacatttctgctatgtttaaatttttttttggaatgagaatgcatagtttccactgattgattgttatgactactttgaaatgtagttagcaaaaatttatttcttgaatggttcacccacaatgtaactgtatataaataatagagatcaagcagttagaccctaggataaaagtttttttaattggttcattactgttatgtctcccttgccttaaataactgactaaaagtaatatatgatttcctgctcatagtgaacctttatatatgatatatatctatatgaaatgaagttacaacttctgttttatgcttttaattttgacacattcactgtgataatttttagctttgacttttcaaaatgtctgcttaatatttagcatgacaacgtttagcttttatttgtattttgacctaaaatctaattaatgaaaaaaaaaggctgtcttctatttttgttcatttcggagacagagtctcactgtgtttcccaagttggagcccagcctccaattcctgggttcaagtgatcttcccacctcagcctcccaagcagctgggactacaggtatatgccaccacacccagctcattttaaaatttttttgtagaaatggaatcttgctatgttgcccaggctggtctcgaactcctggctttaagcagtcccacttcagcctcccagagtgctgagattacaggcatgagctaccacacctggcctgactttttaaaaattttaagttgtactcacattattgttcttttatttaacctagttctattgtagatataaaacaagagaaacattgattatagtaaaattgtatatacagtgtctataagtagctttgtatgtggattaaaaatgcttttgaatcttctaaatggctctgtttttgtcattatagaaatgataggtttgcagtgcggcctgctttgatacatatggaagaatttaacaatggaggctgggacagcggaacctgttagaacttaattatgtggtggaggggcatatgtattcccactttgattattcaccttgattgccctcactgtctctttacactgtggctactttctgctggcttttcacatctctctttttatttctgcctcttcccattggaaggctcctctttattttccagttttgggattcaacacagttatttatatacattcacgaaatcacatattggacacctagaaaccatacagtaagcgagattcttggtacagaaatgaatggaataggcccctgccgttagcaagctcatagtttagtggactagagttgatcctacattgattacataagtgttcaaccaccgatgttacatactaattgatttttaactggaaccagggtgaggatggtgcaggagtggatctgtcctggtcacctttgctcctgctgttctctcatgagagagaatgagcataaagggtgctgagagtctcatgataactgctttcttgattggacactgtgtcttagggatccaacaatgggcctaccctgctttggagttaagcagatgtgtctgtgctggctcagacctcagtgaaagactcagggaatgggagtgcacacatcagggaggggagctggagacttggtagagatggctagccctaaattgacagtatttatttttgtactatcagtacctatattttagtataagttctcagttgcttacatatattagcacttcttctaaatctggtcctgtgatttgcatgacttaaaaaattagaagtgcaaatctgtaatgtttgcagacaatctgctggtttgctctggaatatagacattaactttatggtaaaagtggtcacacttttctttaaaattgggcttgggctgggcacggtggctcatgcctgtaatcccagcacttcgggaggccacggcgggcagatcacctgaggttgggagttcaagaccagccagaccaacatggagaaaccccgcctctactaaaaatacaaaattagctgggcgtggtggcacacgcctgtaatcctagctatttgggaggctgaggcaggagaatcgctgaacctgggaggcagaggttgcagtgagccgagattgtgccatggcactccagcctggtcaacaagaacaaaactccgtctcaaaataaataaataaataactccatatcaaaataaataaaataaaaataaaggcttgaaatcatcaaaggactgatttctccactgttggggcacacttatttctagaatctccacttttattctaaggatatttcagaattatcagataaacttatgtttaatttattaaaaagaattatgtatcatacagtagttgtaggagggtatggggcaaagagcatgaaattagatatcattcaagtctgataagtctgagtactggctgcttcaaatgctcaaatctatcacaaataaaaaagatttattgtaagatgattctgatgactaatggaagctctgaaggattaatttttttcattgactttcacatagtttttgctctttatattgctatgtcactctcttttaatcactttattacagttgcctgttacaagtcagtggagttttattggagatgtgtgtgtgtgtgtttacatgcacaaatagcgattacatatttaatttgggaaacatctctgtagaaattcaataaaaattcactctgctcctcacagtcttccttttatagattatagttcatgcatttatctattcttcagtttattttctaaatataagtttattttagataaaataaacttcaagttacatttatttaagaccatagtgtcatgtttcctttaatactgttggatcattgaatttttctgaagtctgaatgtaagaacactttagggaaaaaatatttttccatttgtaaatgtagagttataagtgtagaggtcctgccttagaaggttgattaatttatctgttatttgaagataatgtttttgtacatgtaaaggtatttatataatttatgaccgtatctcactgactttaatgagctaacctgtgaacatagttgtttagaatatgacttacttgctttataaaaccattttttcattttttatttttcgaggagggatgaggatttgcctgaaaacatttttttctcacaagctgcccaactaccaaaaaaatcattcttccaaaacctcctgatgttgattcctcatgaagagcagttgagttgcccaatgtgtgccactcatgacagaagcccccttttttagaaacacagtttttaagaaatgcttttatgaagttgaatttaccttagtgttgtcagcattctaatttttttttttttcagatgagaatcgtgactcatttaaagatctttgggcataggaattttcctcagaaaatgcctaaccgaattgtgtgctaatcagagtgatagtagctaggcgtttggcaaatactcttctgataatttatttttcacacaaaggtgcttttagctctttatcactatcctcccccccgccaccttttttttgtagctgtagtatattatcagttcatggccgaagagttctggagctctaaatattttgggtagtgttaagtttctgtagctttgtcttttacgtttttggtggcgttaaaaactttgtgcttttaaaaaatgatttaacttggaagtgtttacatagcaacaggatatttatttagaagattagatgctccagagctattattctggatgctacgaattgaaattagagtacaggtggcggtggtttttggtggcactgcacatcagtatatttggaggaaaaaaaggaggcatcctggagactgattttataagtatccctaattgttttttaaattggtaataataaaaaggaaaccataaagaggaagaaggatgttttgtgaatcttccaagaaatttgggaaagatactaagtttactgacctgctaagaagtgtctgtaaatgatgatgttttgactttattggagtggactataggaaaacaggaaaagcaaggagcaaagggaaggttaagttgttctgcatttaaaactaagaacttagaaaattcagctggttaaatttctgattcctcgttttatgtagcaaaagtctgcagccagtgacaaaaattatataatttggaaattattaaattcaactgagtttgtcagcaatcctaagaaacaaaatgtcatttactgctcttggaggtttatacagtttatataagtttatatatatagttaatgaagttagttgaaaaatgagacttgtaggattagccgtaagccagactaacatctaatatttattaccatttgtggggaccatgataaattgtcaatgggaagtccatctgcttggaaaaaagtttttatattagttaaagcccaggaattgtagaagtagaagtggtatattccagagtcaggattcacctattcctctcatactttatgcttataccttataccattacaaagggaatgttgcttagttgtctttgaccttggaaatggtgggaacatgaatttgtcctgaaaatgctttttgttgctaggagaaggaaggtttctaacagctattgcaccttaaaataatttggggatgcttaatgtgtgacatttttgataagaaaataattagtgactttcccacattgcagaaagttttcatttatatgccacttgaactttactactagcaacaaagggatgttgacagaactttcagagttgaacagatacagagtagaaatgatatggaacgtttccagagagtattcccaactgaatccagttaaagtggttttcaatttagctcatacatttagggtgatggttttcagataaggtgtagtaaatatttggattgtcactacatggttttatgagatccgaatctaggcaaaaatgtacagttaataagatgcactaagaaaaagttgtgacttccatcttggtgttcattttccctgggtagaaatgccaaatgaacgttaatcagaaaggaaaatcaagtgcgtacgaacatattcactcccctttagagaagctcttacaaggataaggaaagagaggtacaaatgttaacagttaacaaatgtgtatctatatataccttcgacagataaagatattaccaatgataagaagcactgggatccttaaagatgaattaaatctagagcctactctgaagaagtgtatgttctttgagagattgagcatatataggagctatgtggtagaaataataactcttaatgtgtgtcaaatcctgctctaagcactttatattaactcctttaattctcacagcagccttatgaagtaggtataatagttaatatagatgaggaaactgaagcacagagaggttaaataaaatttccaaagtcatatagctaataaggggcagaactgtgtgaccttggtctggtcacagtttacacgttgtaaaccttagtgttttactaattcttgaaagcagttggcgcttataggaatgattttctaaatcaaatggcttttgaggagtcctcatttgcactaggttatgagatctggacctaccatttgtatcttggtaagccatttgtaaggcttatcaaggttatccagtaagccttactgaacattaaagtagaaagattcgtgttgctatgaagttaggaacacaggggatctaccactagggaaaacgatgtttagtgaaaacctaaaactctcctggcctagacagatacaaggaataaattgctccaggattctgaaatgacttatatgcctgggtacagctggagaagattagtaggtcaggagacctgtgaagtcagtggacaaggtggcacagccatgaactttgtgaggacagactgtgtacagactgtcataagaacaaactgatgcttttagcaaaatttttatgcatccccaccccactttctttttggcagggttagaagaaagatttaatttttgaaaacttttaatagtagaaaatttcaaacatacacaaaaatagagtagtgtaatgaacccccatgtacccattatatagcatcagcaattaccaacatatagccaatcttattcttcttccctccagctatctctgctgaaatactttaaagcaaattctgatgatcattattttatccacataaatgtgttacatgtcttctaagtgataaggactcttaagtacataaccttgatacaattatcttaccattaaatgaacaaaacaatattactagatagctactcaatgttcacatttccccaaaagccttgtaaatgctttatttacagttaatttgttcaagttgagacctcagcaaggtatgtgcacacattgtgtttggttgatatgtctcttaagtttctttaagtctgtggtaattccctcttctctcttttccttaccattttttttgtttaaaaaattggttaatttattttgtagcattttgtatattttgaatttagctgattgcatccttttagtgtttaacatgttccttcatgccctgttatttacctttaactggtagttacagaaacttgatcagacttttggcaagaacacttacttcatagacggtgttgtgtgcttcacatcacatccaggtgtgttgttgtatcacatcaggaggcatatgatttcttgctggagctcttgttaagataaaccaatgggcttaggtgctgccagtgtgatccatatagtgtaaagttctccgtcagcctttcatctggtagttctggcccattaactttgcctacattaattattttcttaggaagaggttgactctcattttcagacatatgtgggctttgcagatagtagttgtatccagccaaaaaaagacaaaatttgtgtttggggcatacgactgaaagcaaattatagttaagccttggtcatctctgacttaactatgccagtactgaaggatatgaaagtgtatttatatgcacacatatgatatacaaacatttattgggatgctctgtattttgatagaataaaaactggatacttgtcctttctaccctggaacatgagttgacccgttcattagggctcattaatctttgcagataatcaaaagccacgtcaagtaataagacgttctctggtgaagttgaggagccaatggttagacaagactagtcctgccaaattaagatcaatcccacatcagagcccagcttttaaaatttgtgttcagtgcttagaatgctcagatccttcagggcattgccttcccaatacttgggaatcagattgagtcatcaaaagtcagtttggtgaggattagaagtgagtaagagttctcatccaagatttaataataaaaatctgatgacctacttgtgttttaattagtaatgaccttttaatgaccagtgtattgttgtccagttggtgtcatttaccctttagcagtaataatttcttaaccagctttccttttttcctattcctgttccatcatctaactttaactaaattattaaagtctctctctcataatgttctacaactaatttgctcttttgattttctttttgggtctttgtaagtaacaaattagaaacatttcagtcgagattctctcatgtactgtatacacatgaagtagatagaatgcagcatatcttctttgagtgccattcacgctcttgattattcttaatttagtccaaccttttaaaactttcaatttgtagaatacatttatgggcagcaaatagttttttattgtgtccactaggaaataaaagtgtcattcacgtgttaatatttttgaaattgggagttatttaatgagggtcaaaagaagccatttggatgggaagaggagtataatattgctaattattacagtattacctttgtgtggaagatgcctgctcattttctacctttgttatttgcttttgtagtgacatagttggattttaatttaaatttgactgtgaattgttacctaacatttcttaaaaatgattatatagtgaaatgcagtgctgaaatggaaagttggtggagtatacaaaagatcgccacgtcttatgactcatggcagttaaaaatgccacatatcgttttcaaagccagaagatgtctgactaatttttgtgtcatgaaattctattgttagcatttttctactaaaagcttctggtaactttttcagagaacctgcataacatccagttatacatattttgattaatgaggaaaaaaaagaaacaacaaattggacccatcaggaaatacagataaaacaccctattgtgtctcttagtgaaactgtttgtcctaaagatgttaaatcaaacatttgagcttcgattccttatttattgaagaaatatttgagttcctattaaatgacaggtgctgttacgaaaagaactgagttgtcggactcattagaatgttctgtctgatttccaatggtcagaagtcatgccgatggaggctgggcgtggtggctcatgcctgtaatctcagcgctttgggaggctgaggcagatggctcacctgaggtcaggagtttgagaccagcctggccaacatggcgaaaccccgtctctattaaaaatacaaaaattagccgggtgtggtggcaagcacctataatcccagctacttgggaggctgaggcaggggaattgcttgaacccaggaggtggaggttgcagtgaaccgagatcgtgcctgggcaacaagaacgaaactttgtctcaaaaaaaaaaaaaaaaaaaaaaaggtaccatgtagtagtaacaggttatttgaaggctctctaaatggtcttaattaaaatataaacaaaattatgtatatgacttaattattcttttgcctttccggattcttaaggacagatcatggtgaaaaacagttattacaggtaaagtggtgtgaattgtttgctttgagggtaaagtaattggtcagttggacaaggtagtcaggtgtgccctggagggtggagagaagtcagcttggaataaaaaattaactgaacctgggcaacatggtgaaaccccttctctacaaaaaaatacaaaaattagctaggcgtggtggcctgtaatcccagctacccaggaggctgaggtgggagtatcgcctaagctcgggaggtgaaagccgcagtgagatgtgatcatgccactgcactccagcctgggcagcagagtgagaccttctgtcagaaaacaaacaaacaaaaaactgtgattcactatggagtcgaaaagaaggaaggtagactctctgactttcctgagttaggatgatgtggacgtacacactctttgctttaagaagatgttcttggccaggcgcagtggctcacgcctgtaatcccagcactttgggaggccgaggtgggcggatcatgaggtcaggagatcgagaccatcctggctaacacagtgaaaccccgcctctactaaaaatacaaaaaattagccgggcgtagtggcgggggcctgtagtcccagctactcgggaggctgaggcaggagaatggcgtgaacccaggaagtggagcttgcagtgagccgagattgtgccactgcaccccagcctgggcgacagagtgagactccgtctcaaaaaaaaaaaaagatgttcttgaagtcaggagtctgctaggtatttgaaggacatctggcttgataatccttgataatattttcatacctgtttgtaaatcaactattgatatatgatggagaaaaatatattcataaaccatatcttcctactttatctctaattcacttggaatttgttttacttgtttttaggcttgtttatgtatttggatagttataaaaaccaattacaaatattaatggaaataaggaaatttttatttcatatttccaatattgacaccttgaggtgttttctgacaccaagcaattctctgacagcaaccgtgtatccaacaattgaattcatttctgacactatttacctggagttagcatcagatctcacaagttgaagggctcagtgcttcaagattctcctcacttaggatgctagtcacaaatggggtgtttaggatactcatactcctgcttggatgacttcaaatttgggggttcccattatcaaacttgaccacaacccccatcaagtttgataatttgctagcatgtcttatggaactcaggaaataactttatttactgttattggctttattataaaggttacagctcatgaacagccaaatggaagagataggaccctgtatagggcaaggtattgggagtaaggggacaggggaatagcgcagaggttctgtgacctttccgtgcacactatccttgattcatttaccaatctggaagctccccgaaccctattgttaggggtttttatggaggttttattaggtaggcatgattgattgtatcattggccattggactccgtctctagtccttttcaccttcctggaggtgtgtgtatgggggcgtggcagctgaaagttttaacagtctactcacttggttgtttttttctggtggccagcccctatcctgaagttatataggggccctctgagagttaccagactcttgcacaaagtcaggtatggttgaaagggccacattatcggtaacaaaagacactcctgtcactcaggagattctaagggttttcagagctctgtgccccaaacctgggacaaaggcaaaatacagttatatttttcattgtactacaggtacttctgtagcaaaattaccttgcacacaattggcccacagctttgaatctatctgggaaaaagagtggtaatcccataatgggttgtctactggattggtgatttttctgtcgtgaaaaggatgaacatggtttgtttccttggagcaaatgggtacttaggctaggaagttctctgcatcttatagctttctttattctaatctacttgctaatgaagttcatatagaattgaagtgcagaagagttaattacttatgacttatgaccagtctggctttcttgtatagttaataacattattacttataacattataaacttgccaagaaggagaagtcagatctgattgttttgatgtaaggaaaaactcaaacttttttcctctgctttcacaccatacaacaatcaacatagaagactttgtgaccaaatatgggggatttctccccactagcaaacaaataatcacttctgcagcacataccagctgggtgtcctccagttcaattatcacacagcttacctggagatagtgtcagatcccaccggttgagggctcagtcccacaaggctgcccctgcttcagataccagttgttaagtctgggccttcagaacttctgactgtccggctcccagttgggtttcccacaaccctcctttggggttaattaatttgctggtctttctggtcaccagccctcatcctgaagctaggtgctgccagtcatcagtcaactcattagcatccaaaaaatacatcaccttggaaattccaagaatttaaggagttgtgtgccaggaaatggggacaaaaccaaaaatatatatttctcaataccatatttggtagctcctcaatttgtgtgctgttgtgagtacttacgtgtcagctgaaatatggatccccttagccctgtggcctggggccactcactagagctctgtgtcattgtccttgagtcaagaacagacttatatttctttcattgtgttgtacacattttttttttcatatgcacatataaaaaaggtttggaagcactgattgaaaaaatattgatgttatagttataaaatatggttaatgtttttatttcacttataggtggtgaacagttgttaaaatagggtggtgataggatgtcatggcatttaccaagcaggaaaaataaatgtgatgtaagacctgtgtgcacgtggttccttgctagggttcaagcaagctgttcttcagagagtatctgatatgtgcttctgtctgtacagtgaggtcagactagaagccactccgtgggctctgggatatagatggaaatcagaacaagccttatgacttttcttgacatagctttcataagtttgcatattctattccttattccattagtaagattgctactaaaaaaataagcatcagttatgtggatggttttccagaaatctgagtatcttgttcttgttacattgtgagacagtaacttaaaactttggggtgctcatgaggagcttaattagaatattgagttggattaggaggcagaggttatcaaagtggcctgtgtattgcaaagtaagagaccactgttgactgttgtacatagaaaattttgttggggttgatcaatttgggtttgtgtctcacttgtcttcatgggatttctgttgatatactcacaagttcgaggcttaaaaacacaaatgccctttggatttgccagagatttaggcatcacatggatttaaaaatggtctgagcacctggataaaatgctgagtacctttactgactcttgctatgctgcaaatgtttcctcttcctggctagaactctcagcacatgtatagcaatagtgtttctgtgtgaatggaatcagtgcaggtatgtagcagattaggccgttcttattaaggactgtgaaagatgatggtatgagtgaactctttaaatgagctagggacaaattaaggattcagagaactattaacacattctcttctcccctgaaccaaaggtggagataactggctgcctccttttgggtatccatttggaaccttctcagagtggttgtgtaattgtgaaattccaactcttaggttcccatgaagtctacttgcaaaatcattggaacatggaattggggttcggggggttatttcggataagctttttatattttgttggtgattaaaatgttgttaaatttagcaacattttaaactacagtagggccttctttgattagctggctccctgggtaatttttatggggttggactaatcatgacttggccagagagattttcaatttagcctgtggaattatatatttgcttgttggtagtagacatctggctcagagtctgatagaaagtgttgctgttattggctttaagtgatagctcaaaggtgtggctggctgtggaatcccataatgatggcactgtgcttaattgatgtgaaataactggagatcagagaggggctattataatcaatggcattggtggttagctgaatcagagaatggatgaatcagttatgagtttctgttaataggtttaaaaggaatttagggtgttttgggagctgcattccatgaagcttcataaaccccttattttattataactgaaatgagttaaattttttttttccttgttagatgagcagcttggaagcgagttttgggcttttaagccttccaactctccctgaaggcttttgttaaccaaagaaggactccatacatagtaagaggtagtctacaagtagaatgctgcttttgcctttgtctggtgttctaagaatctgataggagctgttaagccttttgttgtcaaagcagtaccctttcaggaactgatagaggagtgacacaatccttggtattctgggttaaattttttttttctacccaagaaaaggactatgaatcttttgccagaggtcggaaatgctgagggtgaattattttgttttttttttccttgacagtagagcctctgaggcccgatcctgtcagatgaggaaaatgtttaatatttaggaatcatggctgttagtaatctacttttaccctggtttaggacttggccatcataaatgtagacagttatcataattgataataaagctggaatgagtgactatctagctgactctgttatgcatagtaatgcctttactcctcacagtgcccctatggggaaggtaatattaatcccatttggcaggtatggcgctaaggcagagaggtgaagtcatttacccaagagatattatatagctagtaagtagcagagttgagcttcaaaactaggccgattggcactgctagtctatattgatttccctggtttctagtttaatagaattaggaaggatcctggattaggataggaataagatttttatgggaaagtggttttaaacacatttacaaagcaagctgaattctttgttgctaatatattttgttggtttaaacgctatcaaacaaacattttccagttttcttctctagagaatttaatactttctcaattaggttttaatatgtacttataactaatatcatagtagttaccacttttcatgtctactgtttgccactattatagcatatttaagatatattaatccttatcacaacagtactgccaagtagcagactgtttttatcctggtttcacagatgtgtagtgtactagaccacagaaatattcttgtttgtatcttgattagtgttccagtggtatttattagtattttcagtggtgatcatttgacatcttggaaaagaattttctttcctattcctaccctttaacctccttgtactacatttctttttctttttttttgagacaggatctcactatgttgcccaggctgcttttgaactcatgggcgcaaacgatccttttgctttggcctcccaaagtgctgggattacaggcatgagtcaccatgtctggcctcacatttctttttaattttttggcagaatgcccaacgaaacagtctttgtggaggggtcagctaccttatctattgttcatctccactgcctggcatataacttgtttgtaattgtggtatttctgcacttgttgttgtgtaaattattatattgggctttctaaaaatccattttacacacaaaagtgtaaaatgtgctaaaagttgctgttgggatatttacttgatttcttaaactcagaaccatctagtttccaaaatgcttagctgtgtggatgaacaacagtgctttattgatgagagttcaaagttctgagtgagattttatgaactttttagtaattgctcactcttatgtatcaaagattgccagtggggggagataggggcaatataatattagctgatagcagctcacttaatacatggatatatggaatacctgatattgcgagtctaacatctctttttctttatttatttttatttatttatttattttttgagacgcagtttcactcttgtcacccaggctggagtgcaatggcgcgatctctgctcactgaaacctatacctcctgggttcaagcgattccattgcctcagcctcccgagtagctgggattacaggtgtctgccaccacgcccggctaatttttgtatttttagtagagacggggttttaccatgttggcctggctggtcttgaactcctgacctcaggtggtccgtccgcctcagcctcccaaagtgctaggattacaggcatgagccaccgtgcctgacctaacatctctttttcttttgagcttatgaaatattaggtctctcattaccgtagtaatttagggagaaaagagaatgaaagtaagttctttactaccactttatttcctcatttctgaaattgtttgactgtaaagttgcatagttggaattgtgggttactcatttcataaccagtgattgcagataattaaaaaattattccaggtaatctttctgttttgaaaatgaggtagtaacaatgagagccaaggaagaaatgagaatttaaatgacagctcccctctctgcgatgtgatgttctgaatacttgtaagtcaaataccaatattcttgaaggtattctatgaatgacttgtacactgcagttccaggtttctctttattgtgtggtggttctagggaataccctgtggtgtcaatgggtgttccctaaaagggattgattcagattgctttttgattattccttcctggctcctttcgcatgtgagtagttgacttgaaagagcaactgtttaatttttatgattcttttcattagttgggtggtagttctgtctcacctgagcttgcttatatgtatttagtaggtctattaggaagactgggactgctgggccttttgttccatgtggtctttcatcaaggagaatagactgagctgcttcacattcaaactcagggtagctttccaggagggcaaaagtggaagctgcaaggcctcataaagggcttagatttggaagtcatacagtattccttctgctatagtattgtggttaaatcaagccccaaggccagcccagattcaaaaggtagggaaatagacctcacctatttatggaaggagcagcaaggtccctttgcagatgggtatggactcagggagctgtggttccttggtggttatttttgtgacaatctaccaaataacctacagtgaactcagcattatatcaaaaaggttatactctagaggcagctattgtagatccttcagtggtcttcattaccatgaacaatgaagtactttgctgttactacaacagatgttaaacaagggctatcaaatatggtgatatcagtggagttgaagatatgcagattggctaaaatgttgtagagacggtttccattcttacaggctgggtgggaggattctagtgattgtagttctctgattctgaccatacaggtaacagaatcttgctttcctgtgatataatgaaacgaaacaagcccattagatggcggcagggggcagggggcagtgaaatgttgataagaaaaacaatctactaataattctaatttaataaatatttgttgaactgctgttttgtctgaggtactgttataggtgatttgcagagttcaaagataaatcaagatagttaaaaatttaaagcagaaaattgtttacaattttttgatggaaacagacttgaggatgagaggatggtaaggtgagcccagtgtaaagtgtttcttcctgagggacatactgatgtttttggaaactaaataatgctggctcttaatagaggaactgacaccttttgctgttctataaaatgtgaaggagagatgcttttggtaacctagattgcagagattccatagattttgtattgagtagtggactctcaactgcccgtgttgaggtttttggccaagatcgaagcaaactatatgctcagcttagctggttgtggaaagcaatgttaaaaaggtttgtattgcttgagaagttagtggagggagaatattcagggctctttatcatcttgtttttaaagctaaataaacctggaaggtgtcttccctccaacttcaatattctgtgagtcagtgagttgctcacaactagacaaagggtattcctaggcctcagtgaatgtggatacacttgaccaatccctttcttcaggattacagttcttaatattcttgatgattccatgtttgggagtgcttttctcatgagaaatttgaggaagacactgtgtgccgatgctgtgaaaagcttgtttgaaaggtgctggctgttctcttaaggcagagttttgaaaccagaatttcaaggatgattctgacagattgttgccctcagccttggagtggctgagtggggacaggactgctcaatgcctaggccagcctctgggccagctgcaattctaattttcccagcatgttgaacaaatattctcatcttttaaacaagccattgcatgaaaaaagtaggcagtattgctttgaggggtggaacagtgctttggaagtgtgatgaggacaggtactgttcctaagtcagggttcttggttgcaaacaacaaagatttactccagccaataaccatataggcttaagttgtctgaggctgtccatgtcaactttattcccaaatcaataaacatttggaagtgttttctgtatcaggcacagagctaaggttttaggtatacagagaatctctcgcaggaaaccgcttctgtataaatattttaggatgtttgatgcctcgtttctctcctgctatagttaaagggacaatgtttatctgtgttgactggttagaaattgatgatatgacagtcccaccaaaggggttattataatcacaaattcataatgtttttgatcagttattttaaaccctgttgtacaaatatttcaatctttgttagcatctaaaaatcttcacaggtcatttatagtatcacgtccctcctttctccctgtgaaagttgtttcaagtttttgaaaaaaattcatattaatgtcctatttgcttgtaattttttgtcattaaaaatatctgaatacatggtgacagattgcctttcggttttgatttttttgagggacccttgaaaaagaagtaaaggagagaaggacccagccccagtagaggctctagtacttagagaaagtgaatgggagaggagaagatgcctttttttaaaaaaaaaaaagctcatgcctccaggtagccagaaacagcttctcctgagtattgtaaaagctatttttctacttttcttgaatctcaccttcggttgacattttggggccttccttttcctcctcaaaactgcctttcaagttcatcttaaactgatcagcatttgaagagttggggtacacagatgagacccagcaaggtaacttgatcatgtgctaagctcgttggcacttgttttaggctttgagtgatctttgcttggaaaggcttcgaaacctacagaattacttagtgtgttttgttagtaaatgatcagaatataaatttggactttttcaagataattgcagatgtctctgaagtgtagactgtgtttaaatctaatttatgtaacttaaatcacattctcttcatcatggtgtacgtttatgaagttaatggcctttaaagctttcaatttagtttttatttaaatgtgaatgcaatgctgaaaaaaatctctctgtgtattcagtataaatacttatattcaagaaaacagtttaagttttaactgttgtaatatattttattgtttatctggtaaggttagctactattccgtcaaattgggctttctaagaaaggaccaatttttgtttttctttggatagttttcacaatagttctttgttctgtccttgtcttgcattttatcttagtcttatattaatttttcttcacacggaggtaatggatgatgtgccagatggtttcaaacacagactacatgacatatgctcagtttttgatttgaggagtttgtaaagattttcttcaaattgtgatagcaaagttccttaacttaattttttctgtaaacgatttgccatattaaggtaattaataggttcaagttccagagattaggagcttagtatctttggggaccaccattcagcccattacagtctgttttctgggccccaaatattcatatccttcccatgtgcaaaatacatttaccctaccccagcgtctccaaaattttgactcattacagtattaactcaaatgtaaatctcacctaaatattaccagctcaaaaatcccaaatcccattatgaaaatcatttaaatcaggcatgggtaaaactctgagtattatccagggcaaattccatttggtttcaagacccgggagtaatcctctatctttaaatattttctaaagaaaaattctcaagaagtaaaagagcatatttactaaaaaaacctttttttttgtatattgctgaacctctcacagaaagtttttctaccagcaatatatcttattagtgattcttctacctagccattctgatcatcatgttatcattatgtatatataatataaaaccttcaaactttgccattttcatatgaacaaaagcttaaaatgtttttggtgttagtgtctttttatattttcccttgatttgtctttactgctcatattcttatcactttttttctatttttcttgatttctatgatgtctttatatatttagagctactgatttttgtattgcaagagttttcccaaggttcaatttttttttagttttgttttttggtaatatactgagggtttttgttttttttttaaatacagtcatatctgctatgtttcctagtgtaccctttgcacatgttgtttgaatgtccttcctctacattatgtggaaaagtcatactgtactaaccttatttctgaaaatggatgtgtttggtcttcgtgggaattcacatgatctggtagaaaggaggcttatctttgaaagcagatctaggggccgtggcaaggagctctgtgctcttgtctctttgccatcttctccatccagtgtggctccgtcagattttcagatctcacatttacagtttgaaccctctattaaatcctcatccactgaggtcagaaagtgtttggattgcagagatattttttgagtagttaattgtataataaactctagagagtgagttcaggaaaaagtgtctctaaggtgaatgtgaaaccaagatatgctgcaaatgcttaaaaaattcagttctgttacaaggtatccttttaagtcctaaagaaatgattctgtaagacttattgatatagaaagaaatgttagtgaataaagcattttacaaagcattttcatggtctgatttcaattgtagtgaaaaaatacatgtccctatctatgtatagaaaaaagtctgcagtagttagtaaactgattattttgagatacttggattgataagtttatgtaaaattttaaccctatgtattgtataggtgtatatgtaacatttttaatatatttgatctttttttgcattttctgcccttctaccatggtggttttacttgggtaataaaaaacattggtatctcttcccttcctaccctaaagaaacagcttcatggaaataattatttagaatacttgtattactaacttgaagtttactctaccgtaatgtttttagcaaatttttcagattcttcactctgttgtttatattcattaaaatgagggaaaacgatatttattaaactgagggcattaagtataacactgaacagatggtaatatttttagaatttttcagtatatctactgagataattgatttttataatagtattttcacttgcaaaagtattaacttccctgaataatggaaacttgaagtgatagcattctatctattgtatcatagcctagtgaatgatttgtagttagtaacaactttagattattttattttttcttagtttaagaaattcctcattgcctttcaaaatattgtcctatattaactgtttgttaaagcaagttctcttgccttttggtgtgactttcttatgccctcagaatagtacctgttttgtagtacttgaaacttttactttttatttgttatttctcaggtaaacgcaaagcactgaagttgaattttgcaaatccacctttcaaatctacagcaaggtttactctgaatcccaatcctacaggagttcaaaacccacacatgtgagtattcttggtaatcaaaggctcaactcaagcaaagattttaaagttactgtattttatgaatttttccaattatgagatgtcagtataatttctctgactaaactctctgggaatattgtttattcttttccttctggagttccagttaaattgcaagttgcatttaggaaatttgactgtcttctgtccaactgtacaaattttcaccacttagtgacaaaatagagtcccatcttaataagctagattcctgcaagatttctatgtcatagtaaattgaaagagttgtgtacatgtgagtgtacacatatcagtggttatttcatttactgaatttttaaacaatagaaatgatattgtagcatcttagtgaaaatattagagcatcttagttaacataaagcaataccttcagaacaatattttacattaaccttcaattgaatttaagtgatgtgaaatattaaaaaacctcttcttatttcccatcctaacctatcatgaaaatgaaggccagtggctgtacttttataaccatgtccataaaaataattttgagctagtttcgatgttgagaactataaagcaagtggtgtaaggtatgattaaaaagctggcagatacatttttttttaagtaatttctcaacaatttgcatctagatcttattaggcttaaaatacatttattcttcccaaagaggcacttttattgctattttctcttctttcagaatttggtatgcattgtatttacaaacagtaacaaattggtagaaggtagtgtcttgcaaaagagatgcttaaaatatttttaaaacagcaatgtctagaagggagtagtttcacttgtagccttagagggaatgaaagatattttaaataaaaagtgtagtaacaatttatttttctcaattgtctattaattttattagactggtgttcataatcacacttcttgtcagagctcagcctagagtcccactctttttaccttctctgaaacatcaagtaggggctatcttgaggaaggaaacttagtacttattaattagtcagaatttcagcagcaaggaaacaattcttaaaagaacctccttccttatttcttagaatttgtagtgaaagctagtgcaaaactaattctttaacatagcccccttctgttaccttagttactagctgaaccatatgttggaagtctaagaaggaaaggatatagcagtaatcaccaaacttatcagatctttcttttttaaaagcctttttggacaaggagaaagacaacctgacttaaattaaaactggaaaaacattcatctatttgtactgtcttccctctggagtttctttatgtatgtggaattcatggagcaaaattttttaaaaaatagtaaacacagggtggaaaaaaactttcttccaaagttgagttcaggttttattttttgttttgttcttaactaatgttttataataaacctatagccagctagatttctcatcctttgtttcttcccagcaagtatttaaaatttgaaaggacatggtaataggtagttttaccttatgatagaatctttagagcttgattctggtatgtaaaaattttagacccagactttgttgtaagttttttattgtacaggtcaattgttctgggttaggaataggtaactactagcattgttactggtcagagataactgttttattacttagaacaacattatctcctctaccttcccagccccttccaaaaggtatccttttgtactcttcctctgagttgtttgccatcaagcactaaaaacagttgttagtttctgtttaggatgagtacttgcaattagaaaaacataacttgtagtttgtgggagttttgaaataagatatctcttaacatttatatgttttttctcctaaaatttccttgaactttaataattacagatgtgaatataaaacttgttcatgaatttaggaaaagataagatgaaataagcaagctaatgaagttaagatatgtcacaggatctggtttcagatctccttggcatttgatgtctcctggatgcaggatcctttgcaagattaaaaaaaaaattgtaagacagtgttctttttttctgagaaccaacagtttaaataaaattccaagaaatgacaattggctgtcgtaattttagtaaggcataaggtaatatggattgaatgtcaaattaaaggtgtacaaggggtaaatcattttagaaaacctacttgattaaatgcttcccagaagaacaagattttactggattttgaaagacaggcagggaaggttgagtgaagaagacaagggacagtggcattctggtgagcgtatgcacaagagaagttttgggaaccatgtgtagatctgtttaattgtagcagggatgttatttatagattacctatttctctctctcactggaatcttttagcctgttttctttattcttgatattctgtaattatatgaggataagcctcaaattgcatcatcttcccatgtatcagattaacccttttagtttcaagattcatgtatctctttttctgggaaaattgctgctgctttccttttgatacatttccttcatgtttttcctatcatcttctcctgaaacttgtgttactaggatgttggactgcctatatcccctgtatcctagactctaaaaaaaaatgtgttccgtctcattgttttcttactctgtatcctgggagattttctttattttccatcccctaaatggaatcttggcaatcagttttaatttccaagagttgattgtggcattttcttaggattctattcttaattttggatacaaaatagggaatttaaaaattcttttctgttgtttgaattattgatttcctcaaggatcagtttttcttttacctctttctcagtttttttttacatcttataatttttttttcatgtcttgttcttgattgtttcttgaatggaagctttggttatagatcatcacctggtgggcttggctttacttttctgtgagtattttgagagctagctcttaggccaggaatattaccaatgctagaattagtagagccaaaattcaccttaggaagcctggttctctccagatgtgtttgttctctttgaagacatgccccctttttattttaggggaagaataaagaggaaaagtggaattaactagacctttctttttttttttttttttttaagtggcagggtctcactatattgcccaggctggtcttgaactcctggattccagggatcctcccgcctcagcctcccagagtgctgggattacaggcatgaggtactgcgcctggcctagaacttccttatagaaagaagtttaattaactctggtttctaggccttcatttcttctgaccatgaattctctctgatccagtgttctattgggaccatgatttgtccctcatattcactgcatgcctgcctcctaccatgtgttataggttatagttttttctgtttatttttaaaccttttattatggaaaattgcatacctacccaaaagtaaagtggtagatgaatctgtctttactgtcaatcagctttaacagcttcaacagttaatagcatggccaatgttgttttatcttttccttcaaccccttagttttaaccaaatctcagatgttatgcaatctacaaatattttagtatgcatttataaaagataagagctgcttttaaaagacataatcatagtaccattgctacatctagtagaataaatctttaatatcatcaaataagcagatgacctcattagtttttttatttttaatagtttgaagtgaggtctatacaaggtcctgcattctatgcagttagctgatcagtcttttaaactagagttccttctcttgaaatcgattagtttttctttgtgatacatttttatctactcaggcattcagaaatttaattcttttaatttattgcttatttccttaaaaaaaggatttttggggggatcttggaggatgaggagacaacctgaacaggaaaccttgatttttaattatcaatgattaaaattagaaatatttttgacagaaaatgcatattataatagagactcttgtacccactaacattttttcccttggcttttaaaatgaaagattaaactggatagccaaagagtacaaagaaaaagcaaaggaaaaatgtgtggctaccttttaaattttcatcaggtttggattctactaaacactataaatctttttgatactctagggatattcttataaatgtggccagcttgtgttaaaatcatgttgtgtatatgaatttgacaaacagaagtagatattctgttaaacattctgtgttttcatgatagtgagttatggttgagtgctctcagtgtactgagtcgtttagaatatattcagtacaattgttattctgaaagaacatcccttttatcttcataacatatcacaattgtcaagaaaaaacactagcttaaaagttaacactggaaataaatagtggtggatgcagataacattttggggcttaagagttttggaaccacacgttttaagtttaaagtgctctctttagaccagaggatctctaggatttcccttatctttgtttattacattggaacagacagagactcagttgtgctatagaacatctaggagtagtttaaagaggtttcaaagtccctagttaataactaatattcctcgtatttcttgatgagccttctcagtagaactttatcttaaaacttagaatttcttcttctcttggttaaattgtgagaactgtgtcttataaacgttgctgtcttagaattaatgacgaggccgggcacagttgctcacgcctgcaatcccagcactttgggaggtcgaggcaggaggattgcttgagccaagaagttcgagaccaggctgggcaacatggcaaaaccccatttctacaaaaatagaaaaaattagccacgtgtgatggtgtgcgcctgtggtcccagctacttgggaggctgaggtagaagggtcagttgagccctggaggttgaggctacagtgtaccactgcactccagcctgtgtaagagttgagactctgtctctattaaaaaaaaaaaaaattgtttttaaaaagaaataacaatgggtagaaatttaggagtctggatttctatcctggtgttgtcgttatctctgtgtccttgactttatcacttaattctgctctcaatttaggcattgaattagaatagcgacatacactattttatataatgaataggaaggggagagaattaagccagccttgcactgccttctttaaataaagtctcatgtacaaaactgataggctaaaaagataaaggaggaactgtgctgactgaagtgtttgtgaggtgggagagagttttgtagcgttgtctgccttcattccccagaatagtcccaggacatctctggtggatttctaagtgtgaatacctctaatctacatgaatttggaagtttttttctgtctctgaaattttttgaagcaatcatgatactgtgaaatctctgcatttctgtggtggaccacttttacaaaatagcggtaatggtagaagtatttatgggtatgtattaatagatgatgtttaatctcaaatgtgttaaatactatggggtgtgtgtgtgtgtgtgtgcgcgcgtgtgtgtgtgtggctggtttggtgctactgctgcgaatcttttttcttactgtagtaaatatacataacgtaaaaatttttatcttaaccattttaagtatacagttcattgggattaattgtgttcacattgttgtacatttgtcaccatcatccatctctagaactttttcatcttctcagatcgaacttctgtacccgttaagcaataagtccttattctcccttccttctagccctggcgcccaccattctactttctgtctctatgaatctaactactttttaggtacctctcataagtggaatcataacaatatttattttgtgtctagcttatctcattcaaaataatgtcttcaaggttcattcatgttgtagaatgtatctttctccacccttctttttaagggtgaataaatattattttattgttatgtgtatgcagcattttgtttagccattcatctgttgttggacatttgggttgtttgtaccttttggctctagtaaataatgatgctgtgtttgggataatctttaaagcttagatcattgtacttcttaatgttacagtttagggatattcagtcttatctttagtcccacattccacctcagtgtacctgaggctgtggtacacttccataagtcagcaattcactggagaagtgattctcgacagaggtggcagtggtaataggagtggtagaactgattttctttgtgggcccctacccccttgagattcacattcccttcaagctggatgtttatagctgaggtggtggatgctaattctggaatatgtatttgcatagattaatgatacatgctgttgagttgtgtgcttttggtgttataaatcatctttgttcttgaatcagagactgaggcagacattagaagatagccctggttttttaacccacagtacttctaagtgctgctccttgaagatacatctgacttcttagctattgatgagttttccaaccatttctaatcaggcagttatgtttttgagttctgatttcaatcagaatattataaggccttttatctttgcagtatgtatgtttctggaaacttttatctattattaaggaaatttgctatatgaaggtaacttttttcagtgtgtttttttttaaattatctacaactgagtaacagtatgattatattattgttcttgagcaaatttgttttccccagagttaataactgcctcatatatggttcactgtgaatcttctctcaacatagttaaatacatcagttggtcactcagttctccccctctcccccccctttttttctttttttgagttagctatccatccatactcttgctttaatctggagtggttgcacttgaggtctgcttcacagggctgttgccattgttttgtgaatgcctgattctgattatctgtttccgggatttcatctttttttatttttcactttcccactctcattttggtagagtatatattctaagtcttcctgagataagaattctttcttagtagtttttaattatttctcaagctttttgggtgtttgtatgcctgaatatgcctttgtcttttttcagacaggatcttgctctgttgccctggctggagtaaatggtgctatcatagctcgctgcagtcttgaaccactggactcaagtgattctcctaccttagccttctgagtagctggcactataggcatgtgccaccatccctggctcatttttaaattattttgtagaggacagggtcttgctatgttgcccaggatggtctcgaactcaagctatcttcctgcctcggcctcccagagtgctggaattacaggcatgaaccactgcctggccttgaaaatgtctttaaataaataaccctcataatagatcagcagttttattgggtatagaattctggggtagaaatttttctccagaattgtgtttgtatttcgacaatgttttctattttccatggttactttaaaaggttagatgtgactttgattcctgaacctttgtatgtgatctcttttttcttttgtgatttattgtggggatttttctttttccccacgttctgaaatcttgctgtgtttgcattcttcccccccacctcccctcttcccttttcccagtcttctccctcctttccctcctccccttacctttctttttccttgtagtttgctctcagtggactctttcaatctagaaaccactctttcattctaggaaagacaatttattattattttattcatctgggatgtgtgttcttctgacattgctatattgattcagtgaaatcccatcagacttttaaaatatgtgtaatgtgacattttgattctaaaatatgtatgaaaatgcaaaggacctagctaaaaacaatttgtaaaacagtaagttgggggacttaaaacgacctgatttcaaggttatctgtaacacagtcagcctacaagtacaacctgcaagctacagtaattaaggcttggtggaaggatattaaggataaacgaatagatcaatgcaatataatagaaagtccagtagacaaacacacatgtatagtcaatttatttttgactgtggtgcttataatattcagtgggaaaaaaataggcttttcatagtgatgtaacaaactggaaaaaggtttgaaaggataaattttaatttctacttcataccatatgcaaaaattacctcaagatggatcattgacctaaaagtaaaagcaaaaactctataaagcttctaaaagaaaacatccaaaatatatttgttatctggcataggcagaaatttctttgataggacaaagaaaccactaaaaaataataaattggattttatcaaaattaaaaatttctgctcatcagaagttttttaagaaaataaacaggcaaggccaggcgcagtggctcatgcctgtaatcctagcactttgggaggccgaggcaggcgggtcacttgaggtcaggagttcaagaccagcctgaccaaaatggtaaaactccatctctactaaaaatacaaaattagctggacatggtgtcgcatggctgtaaccccagctacttgggaggctgaggcgagagaattgcttgaatctggaaggcggaggttgccgtaagtagagatcataacactgcactctagcttgggtgacaagagcaaaattctgtcagggggcggggggcggggaggaaagcagggaggaggagaggggaagggggggagagagagagagagagagagaaagagactagaagaaaacattcacaatgtatatatatatatctgacaaaggacttttgtatatataataaaccaaaactcaaaacaacccagtttacttttttgtttttgagacaaaatctcactctgtcaccaaagctggagtgcatcatagcttagcctccagagtacctgggactacaggcacattacatcacacccgactcatttaaaaaaattttttgtagaggtgggatcttgctatgttgcacaggctggttttgaactctccttaagtgatccccctgcctcggcctcccagagtgctagtattacaggcattgagccgctgggccagcccaaagaacccaatttgaaaaatggtttaaagactctgatagacacttcacaaagaaggcattggaatggatgataagtatatgagaaacagccataagaacattagtaataagagaaatgcagactaaaacaaaaaggtgataccactacacttccacccgaagggctagaatttaaaagaccaggcaatatcttggcaaatatgtggtgtaagcagaattctcctatattgttgaggaagcagaaaatggtacaaccactttagaaaactctgctaggtttttaataaaatgaaacaagcacctgcccctgacccagcagtcctaccttttgttatttgcctaagatgaaaatactctcagaaagatttgtaagtgaatgttcatagaaagtttattcagaatagccgccaaattagaaagaacccagagtgttcaataatggaagaatgaagaaacaaattatggtatattatttaacaaaatactcttcctcaataaagtggagaaaatactgatacctgcagtcatattgatggatctctgaaaatgctgagcagaagaagcgagacacaaaagagaacatactgattctatctctatgaaatctagagtaggcagaacagatctgtggtgattgaaatcagatcagtgcttgcctctggaggagattgacaagaatggcaccagggaaccagggaattttctgaggtgatggaatgctctgtatcttgctgtattttgtgaaatagaaaggtgtctgcatttgtcaaaactcattgagccacatatgcttatgatttgtgcatctcactctatgtaaatgatgcctcaattttaaaagcaatcctgaacaataacaattatatatatacatatattattattattattattattattattattattggtgtttgttgtttttttttttttgagacagagtcttgctctgtcatccaggctggagtgcaatggtgcgatctcggctcactgcaacctccgcctactgggttgaagtgattctcctgcctcagcctcccaagtggctgggattacaggcctacaccaccatgcctggctagttttttgtatttttagtagagacaaggtttcaccatgttggccaggctggtcttgaactcttgacctcaggtgatctgcccgcctcagcctcccacagtgctgggattgcaggcatgagccactgcgcctggcctaatttttgtatttttagtagagatggggtttcgccatgttggccaggcttgtctcgaactcttgacctcaggtgatctgtctgactcgcctcccacagtctgggattacaggcttgagccgccgtgcctggccagtaacaataaaaattatagtgatagatttttttactctcactgagcagtatttgtggttttctgtccttgttctcaaagcacctatgtatttcgacaatttagatgacttgatgaatatatgaacactgtgcttttaatgaattcagcttttatgcctgtggaacaatactgtgataaattttatttctgcccatgtggtttcccctttcataatgtttgaaagaaccctagagtgaaatttttaagaaggttatcaagtttcttttgagaattattctagagtatctgttgcaccacatcaggtatagtgtacccctaagtagctagagtcccctaaaaagttgaggggatgtgtttttagtgtgctttaaaaataacatttactattgtttctttctttctttttttttttttaatacagagaaagtataaagaagaaagccaaaatggcccattatcttatcatccaggtagttcatgttaccctttaaaaaatcagtagtacctgcttctggtaagagaattcagttggtgcagaaagttataaaacaaaaaatcagcttcatgcccttaatatttatctccaaagataaccctgttaaatgtaaaatgccttgcagaaaagcttattatatgtcagaatacataatttatatagatccttaaagaatatttacacacaatagcagtttttttctgcacttttttgtagcttgattttttattcacttagtaacttagtacatcttgaaaatatttctgaattaacacatacccttttcctcctcctcctcttcttcttcttctttgttttttgagattttctcactcttgcccaggctggagtgctgtagtgcaatctcagctcaccgcaacctccacctcccaggttcaagtgattcttgtgcctcagcctcccaagaagctgggttttaggcatgcactaccacacatggctaattttttttttttgagacggagtctcgttctgtcgcccaggcgggagtgctgtggcgtgatctccgctcactgcaagctccgccttccgggttcacgccattctcctgcctcagcctcccgagtagctgggactacaggcgcccgccactgcgcccggctaattttttgtatttttagtagagacggggcttcaccgtggtctcgatctcctgacctcgtgatccgcccgcctcggcctcccaaagtgctgggattacaggcgtgagccaccgcgcccggcccacatggctaatttttgtatttttgggtagagatggggtttcaccatgttggccaggctggtcttgaactccttgcctcaagtgatccacccacctcggcctcccaaagtgctgggattacaggggtgagccactgtgccccacccacatacctattcttagttatatagtattcattacattgtataggtgtattatatatttaactagttccttattggtagctatttagattattttcattgttgaattaaaaacaatgttttagagaacaactttgtgctggtgaaatgtacttttaaaaattaaccaatgtttaattcttcatagattggtaattttcagcccttttcttgtcataggagagactggaagtagctgtgttttctcgaccttgttactgttgagatactagattggaaaattctttgttgtgggaggccgtcgtcctgtgcgtggtagaatgtttagtgacagccaaaatgtctccagacattaccaaatgaaccttggagtgcaaatttgcttcttcttaggaccactggtacagcgggcactgcaggtttacacagatgaacctttttcctgactgaggagctgcagaagtcagatataagaggtgtattccttggggtttgaatggatgccagaaaaggggaatttggggaatggctatagggatatctcatagagtccagggagaacatcagagctttgggagcaagtcatagttgccagaaaccaaagcaatccagtatgtgttctttcatacatttagcaaatgtttgttgaatgtctgccatctgctagttactatggtgtgggcataggtatttcatgttgaaaaaagagatgtgattgttacttcatgaagcttgagatttagaggcagacacagacgtgtgtgtgtataaaattataatcacctacttgctattaaaggaagagaaccaggtgctatgagaaaatgaaatatgggcctaatttagaaggagggtggtgaaaatgtagtcaatgaaggcttctaaacttgagtgagttttactagatttggggaagggattgatgagtgttccaagtggaaggaatcgcatgtatttgaaattatcaaggtgggaaatattcaacttgtcatggaatggaaggaatggcagttcacatggagggtgactgaatgagaaaggaaaaacaaacaaatttagattaagggtgtagagacagttaggtatggagagatgggccacataatgtagggccttgtagataaagagctggatgacatccaaagtgcagtggggagttatggaaaagttgtaagtaggtcagtgatttacaatttaaactgattatttacagtctaaagtaattattctggctgccgtgtggactatgtactgaaaggaggtaagaatatagttagggagacctgataaaactatggtaatgtaggtaaagcgtaatagtcacctatcatgacttcaatagtattaaattgatgacagtacatgtagagagactgtaaagacattttggaagtaattaataaatattggtgataatttgaatgtagatgatgacaaggaggaaggtgttcatagtgacttgtagaattctggcttgaattaatgggtttagttgcgattactgtgatggagactactgggtatggagcatctgtaaataggggtcatagggcaagatcgagttttagataatatttaagtttgagggacctgtgacattttattagggatatcaaaacatacatatatatattatatatatatatagcgtgtgtgtatatgtatttatgtatacatgtgtttctgtgcttatgtgcatgtatcacatactctggtgttgaaaatatgagtctggtgccagaagtgaagttgtagattggagataaaaagttgaaaattgctgccatatagatgaaagggttgcctaggaagagagtgagaatgtattttgatgagaaaattgtgtccagggctgagccccaagaaaatctaacatttagaggttggatagaagaggagggacaggcaaaaattaaaagatgcttgataattaggaagcaaactggtagtgcatgatgttatagaaatctagcattgtttcaaagtgcagttgggaaggaattgtggttggctatgtctaatgttctgagaatgctagtaaagctaccttgttggcaaaaactcctgagatacactttaaactactcttaatttcttacttacttgggaagaggttttagctgccactggaaattggggcctaaacagggaaaggatctcatgaaaacatgtaacctatagatttagggcagttttccttaccttttcttgaagaagcatagcccagaaaaactgttctaagggtaaacttagagtacaactgacacaggatcagctcttaggaaacagtcaatagcaacatgatgcaaacatgaatgtttgtcttgtcctctttaatgttactcttttctgtggtgataaaacatttctttgtatgtcataaatcagtactacttcagaatactgcagacttatctaatttgtctaatacattctgttcactaaatatgagtatcagaatttgaaattttctatttagaatgtttgagccattcttctggacatttcatttttcagtttttccttttgcctcatcttagatcacagcaaagatactcatttgttggtagtgccaggaagcaggcagtttccatggtaactgacagaccgagtttactgtggaaatttccggaattaacagagctgcattgcagaaggatgcataaagcagtattcatctagagatcgtaacagtacggacacagaagaacagttgcagtgatgtgcagggtatgtcttacctttattttcctgtctaaggaagattagtcatatatatatatatatatatatatatatatatatatatatatatatatatatatatatatatgcatgctgaggagacagtaaaacagcttggggcgttttagtatatgctggcttgatacagtcaaagttgcttaggaaaaagaaggaagaaatgatttgggaaagaaggtatatttgatagcattgggaagaaatcaagatcagatgatcgaggtagaagaatgtgatagtgaaataagaggagaaaacatacttcaaactaattaaataataaaaggttcttacggatagtggttctaggcacaagaagatatttatttatttattgaaggaaaatagtagacattgtcaagtttgagaaatcaagttctcatgtgcaggaaaaagaaatctgttaagataattagctattacttgctgaaagataggtagatatgagagatgtccaggatattaaacaaggaggtttgctgccatcttagcgtacttacctaagtgatgagagaatcctagaagggtttctgcccctaattccactctctgttgattggtgggccattttcaagaaaaattctgaaatgtatcttgagattaaattctggaaacagaactataggatttgggcagataattgaaggtgcttatcatatagagcataattataaatgtaaaagagaaaaaggatatagaaaatatgatttagattatttgcatgatagatgcaatttaggttgctagataccatttggtatcatttatatcatgtagtcagcaaactacagctcatgagctgaatccatcctgtttgcttgtttttgtaagtaaagttttattggaacatagccacacccatctggctgcatagttgcaggagactagtggcttgcaaagcctaaaatatttgctatctggttctttacagaaaaaggttgtgactcatgatttagatggtgtactggatttttcaaggcttctgtgagattaccacaaacttggtggcttaaaacaacagaaatttattctctcacagttctagaggccagaaatctgaaggtgttggcagggccatgcttctcccgaaggttctgggggaggatcccccctttctttcagcttctggtactgctgctcttccttggcttgtggcagcataaccgtaatctctatggtcttcttccctgtgtctgtcttgtgcatctctatcttctccttttctttgtttggtctcctataaggatagttattttatttagtgcccacctaatccagaatctcttttttgagatctttaattttatccgtaaagataggttactttctgagattctggatggacctatcttttttttgtgtggtgggtggtgtatagttcaccctactacagatggtattgaagaactgggttttggcttcttaaatcacattgtatattaaggatagccagttcttagtgtttcctttgacctgctggagaagatattaaactcacatttcaaaggcaaggtgatagaggcatagttgaatcatagaagatagcctttgtgacacaaacataagcagtagagtaaagggagtactagaaaattcataggagaaagagtactaaaatattcactggagacggatgaagaccagtgcctgatgcttcatatcgttctcttcttgtctcttcatatttttctcaccctaactcccacctccaaaaaaacaacaaaatgaatttgaaattttaatgaaaaatggttggcacaaaaacaaaaatcacagttttgaggaatggctcatcgctaaattacggcactgggaaatatatatatatgattcaaaagaagtagacttaataagcaagtagaggagtggcagtgtagaaggtacacaccaatgtatagaccagtgaacctgagatttggcttttgttgagagcctttttgtcattgtgggagtatacaaactattggcctgggcaggagagaaggtctgtgacattttcctcttctcatatgggcatatttgtaaaccataataacagtggtaggtatctatttgcattccctggaagtctcatttactgtatttgggtatattctgaaatgtttaaaaagtgatgaattcacatggtgaagaatcaaatagtaggcaagggattccaatgtagacgctggagctgcagagaaaagccaccttatattgcctatattctcacctgcgcactttgaaatgaagcttctgatacagacttcatggagatgatcatagaagaattaaatagaaatggttaatccaaattagggttcactaagagtaagtaagcagttccaaactagcctaatatacttttttgaaagtgttactaggactgtagatcaggagtttggaacagactaggtgtatcttgatttcaacatttatgggcacagaggaggaacatgaagcccaatacagtattttcaggaagtttcttagaaggacaagagtgaagtctgcgttttctttctaatcaaattctgttagtctgtgaccatgtatattctgaatatcaaataggaagccatgggaatgaaagttttcttattttcttcctttaacaaaacatttgaattgtatgcctaaataccttcatagaaagatacaaattcccttgaatccaactacaattagacttttaacttttaatttttctgttagtgtcatgagtatatgataagaatatcataaggaactagaataaaatcaggtataaagcatagattgggattaaattgagctggttgatcatagttcacatgtacaggctaaaatttaagcagtataaggtactcatgaataccctagatttcaggtctttgtgttatgtaaaatacacatgttcctaaatgtgtctatacataaaatttatttctataaaattgttttccttttctcatcgacatgtttaaataagtgtctcaaaaataataaaagtaagcttgagggtgtttaataagtaggtgttcaaaacacaactcacatagtattaagaattagctaacagatcacaaatgaaaagtagttgagactcttggtttttaatttgctttaagaactaaatttctgactttgtaaaagcaatctgaggtttgtagtacaaaatgatatatgagtagcagtgtcctgctaaaatatttattaagaaacaaagatgaaaatatgaaacactgaaaattaagatgacttaactccctataggatctgataatggatactaatagtaacacagccagaataaggaaaatttttacccagggattcttttatagcagagacttcatcccttttcatgttcatttcttctcctgcccacactggtaactaccagaaaaaaactggggagagatgggaagagggaggatgctgatgaattttatctgggaagtgtcattatgagtgaagtgtactaggtggaagtagagaaggattgtagtaacagtatagtgctgcccagtatagacttaggattgtatttttatattgctgttatcagtccagaatacagtattagagaccaagaaaattggagagaggagaatttaccatgggagcagtgagtgctctgatttgtaatatactaagccttagatatctcaaatctgcctttgaaccataggcatgtaatgggcaaatccgtatcagacaagtagagtgcagcccaaggataatcttctttttctttctctccttctctcagcagttttattgaggtataattggcatagaataaactgtacatatttaaagcgtataatttgctaggttttgacatatgtgtacatctgtgatgccatcaccatagtcaagttaacatatccgtcattcccagaatttcttccttctcgttgtagattttttttttttttttttctgagacggagtctcgtactgttgcctgggctggagtgcagtggcgtgatctcggctcactgggaacctctgcctcccgggttgaagagattctactgcctcagcctcccaagtagctgggattacaggtgcccaccaccacgcccagctaatttttgtatttttagtagagacgggggttcaccatgttggccaagctgagctcaaactcccgacctcgtgattcgcccacctcggcctcccaaagtgcggggactacaggtgtgagccactgtgcctggcctcttgttgtagtttttgtgtttagacatttgatttggttattttttctgtcttccacgtctatatttaacatactctatccatcctttcgtttttttaatatatggaacgtggtaaatgtttcattgtctttattctagtatttttgtcatttctggtcagttgcaattgattgatgtttttctcttcactatgggtcatgtttttctgcttttttgtatactgtggtaattttagattgcatcccagagattattgtgtgatggctgtttttgtattttcatgaatgtttttgagttttgttctttggttaagttacttggagatagtttgatcctttcaggtcttgctttttagctttcgcagatgagactactctagagctaattttgccttactagtaaggtaaaatccttctaactactttattggtttccaatcaggaagctttccactccagtggctaagaataggagctgccttgtatgagcctgggtatcatgccttcttaatccttttaggtggcttattcttcaggcttgtataggttcctcacaatcatccgctgatcaaggagggccctctgcatatcggtggggttctctttctgtgtagctgtctcttatcctgtactctgccatgtgaactttggctaccttggtctccctagattcccagatccttgtccgcaactcaagggtactgccaggatcttcctggatccccgctccctgtatcacagttggtgaactcttcagcagtaagctggggacacttgtagggctcaccttacatatttccggtctttcagtgtctgctgccctttgtttcctgatgatttccagtgtcttccagattgcctatatattctgtctgtttttttcagttgttttaggtatgagggtaagtctgtctcctgatacttcatagtaggacaagtggaggtgccacattgacactcactgtgagatggaaacaggaattgtggaactagggaataatatcttgaagactttgagaaagagcatctccaaacaagatatcttgcaggattcaaaatagtttcttacaatagtgactgacattgttaatacagtgaaagaagtcatggcgtttataaaaatggattggaaaaatctcgaggagagaacagactggatggatacgcaacaagattatagaaagggggcagatgaggaaaagacataactagggacctgaaaagcagtggtagagtgaaatcccttttgatgcaattgtgaatataaatgatactgcatgacagcaaaagaaaagaatttgagggcagtcattgatttgaaagcatacaaattactgaattttttaaaaatgtaaattcataaacacaagggaaggtaaacaacaaactgggaaaatatttgcaatgcaggacaagggttgatggtgttaataggtaaggaacttgttagtagaagcagcgataacaaaacaaacacctgggccaggaaggctcaggggcgctatctcaggcagttaataataatacaaaaaagacatatttgttcaccagatagcttaagaatgttcaactctagcagttgaaaagaatgatctaaccctaacacctttcaaattggcatgaggaaaaaggtgctgttgactaggtacagtgggcaccttttggctgatagtactcctaaatcagtgcagacttggtacacagccattccagtagtgataaccaattatttaatgactgtgttaaaatatattaagtgaaatctataagcagtaggtataatatgctgtttttgcaacctattcccatagtatacaaagatacaaaataatatgtactaaattgttaatagtggtttttttctggattatgattgatttttccattttcctttttatcttctacctttgtagctttaggagggattttagattcggtgtctggttggaaaaagaggttcaagtactggtactgctgctgaatttgcacagcaaacacactgcatctaatagagggtgggagtgaaggtggaggatgtggctagagctgttctaataaccctacttgactggccactgtgtttctttacaaaacaaggccacctgcctatatatgaagttccaggcagctttattagacattgtatagaaatacagcttttctcagtgtccagtctgattaatgttctgggacattatgtcacagttctgtgtgtgtgtgtgtgtgtgtgtgtgtgtgtgtgtgtgtgtgtgtgtttagtctgtaggatttcagaaatttcagactagtagattagtctgggtcaatgaagggacaacaactaaaatacagtagtgttaattcagtattaaatttaagttaacagatatatttgtcatttctatccagaagataaattaataatcgggaaggacttcactgcaaacatgtagcctcaaaaaattagttttcagattttaatctaacaagataaatctctgatatcaaaatataatttctgtacattgagttgtacttttaataaggcctgtattatatgaattcatgccctatattaagtattctatctataatcttgcatgtttcgcaaaagttaggaccattcatatttcacttcttttgaatgtctgtaacacctgtggcagtttttctgggtgtatgtgcatgtgttttctctagaatgtggaactgttaagtctctgggaaccaagaattattagatgtggaatagtaaggcactgaaatcagggacaccagagttacggattttttgtgtgtttgtattttgtgtgtgtgtgtgtgtattttttgtgtgtgtatcttaatcaaattgtattgctttattcatgtgttttttgcagggtactgtggtatggactagagaacttggaatgacttatgaagaaaccttggaatgacacatgaaggatgataggaaagtcattctgaggcaggatgctttactgaattgtttttaaccagggtatcaaacatcaggaatgagttcaggagaacggaaacatcttaggtgctctgcatgttcagagaaacttctctagtaatgaactatagaaatgacccctgaaagtatagtcttagagttaagattctattcaaggaaatacttttggcctgttgctggaactgctctgtggatttggagacagttagcatcattggcccccagccactaaatgctgcttgcacttcccagtgattgggatgaccaaactgctgctgatgctggaggtgtccgggcactacctcctttgagaatccctgggaaataaaataatgctaggggctgtattaattaaaattaagtttgtttgcatctaaacaacaacaaggataggaacaaatagtggcttaaaccagatagtttatttcacttttccatagaaaagtccggagataagcaggctagggttggtgtagtagcttcactgttattggagtcaatgctattttctgctccatcattctcaggacattatttcagttctgcagggcattgagtgtggctggagctctagtcattacctacattccaggcaacaagaaggaggttggaggaaaagaaaaagagtcttttttccaactgagttagctccttttaagtactgtgttcctattttccacctctaactgcaaggaatgttggtgacttagcttggcctgcaaaataccacatactaggtggcttaaacaacataatttatttctcacaattctcgagactggagagtccaagattaaggtgctggcaaggtaggttttaacctgaggcgtcctgccttggtttataggtggccacctctcactctgagctcaagtgacctcttgtgcatatgagaagagagtgaactctgtggtctctcttcttgtaaggacactaatcccagtggattagggccccacccttcattaaccttcattgaaccttcattatcttcttataggccctgtcttcagtacagtcacatttggggttagggccttaacatgtggattttgagaggaaacacagttcagttcatagtagttgggaaatgtagccttttagctgggtgcattgctgccacacataaatgaggatcctgttagggaggatgaagaggagaatggatgttgggtgacagctgatagttactgccacagcggctgttgtctgagtttcccaggttggtaatgagaaccttggggttggaaccttatgtagtgttcattggaggcaggtaagggtgatctgtataaaataatgcacagaaaattatgaagggaaagatgagggatatttaggaattatttttattttggggggtacatggtgtatatatttatggagtatgtgagatgttttgatatgggcatgcaatgtgtaataatcacatcgtgggaaattgggtgtccatcttctcaagcacttttcctttgtgttacaaacaatccaattgtactaggaattatttttgataaaatatagtccccattctgaagaaagtgatatcccaaggaaaagtcagggaactttttttttctttaagagtataattgtaggcaaatatttatgaacaagtaagggcaactttacatctttattggtttgtatttttcaccaatcttctcattgggtgtgttttctactgtttatgttctttctttcctaggcctcttacgtagtttaggacagaaattgattgactccagagtttaatggaaaggttctggtccagttcctgtatctagtcagtccagtgctgtatctgtgtatagtcctgtggaagccattgtggttgtacctactgttaaagcaattgctgtgaaatggactcagttttgctggaaagatcgctagcccagtataaagacgaatgtatgaacatgccttggtgatgtcataactgtggcatgtttttctgtggtttttacagcactttttctttctaaatgagaaacttggaactctgggtaggaatcacattctcctcttttagcagctttgctgagatgtaattcacatattctgcagttacacatttaaagtgtatagttcatttgcttttagtatatttagtatatttacagaattgtgcatctgacaccttattcagtttttggatattagcccaagtaggtaccctgtatcacttcgctttcaacttattcagttttaaaaagaaactacagtgagctaaactattagtagagatattccataatactaaaatttgatctttaaaataagacataatattgtaactgttttcattctgtaatttctatatagtaatgaaatatctttcatttcagttctcaagaatgctagcataagtattatatagcaatgtagtcatgagagtcatattatatcatctttaccatattctcttggttagaggtaagtcacaggtcccactcacacccaaagaaatatgcctacacaaaaatacgaacactaagaaggtggggatcatgaggacttcctggagcctgtctgccacagcccttcaattagcgaacactgtaaaaaattttgcttctgatttacaagtaattttaattaactttttttcagcttccctcagtggtagattggtgctgtatatttcaccagtgattttgccattgagatagtatttacttgccaaagattatagaacaataatcattatacatggaacttcttcatgttagaacttttttcaggcttaatctgtctacttcatgaaaaagattaccaagaagagtttcctatttttgcctagacctgatttccatcttaaaagatcagttccagcttcatcttcacctaaatggtcacttatgccactgatttccgggcttcttgtgattctggatgctagagtatcaaataatatgggtgaaaggactttgaactgaaaagcacttgtatgaatgaaagcttatcacttagtatgatttgaaagtctgttatttggaacactgatttagtaaattgttatttagaccaagtgtatgaatctttgaagtgtaactttgaaccttaatattagtacatacgattattctcagagtgggggtagattttaaagttctaagttttttgggaaccttaaaggttgctacagaaaaccattctactaattggagaaaactttcctaaattttggaagaagaaaaataatgaccaagcacataaactttgcttgtttgcatcataggatcagagtttaaaagagatcctgatcatttagtatgaaactgaaaaatgtagttgatatttaatgaattctttcattgtgtgtatggttgatagtttgttcctacacattggggtttggtgtgtgtgtgagagagagcaagagagagaaacagattgattttacatttttcattggatttacttttttacaaagcatggttagaagttattaatactttgatctccaggttgagattttggagatgattttttatttaatggaaatatgtaatgagtgagctcttttgtctacgagccactcattttttatcccattgctttatcgaacgagggctgaaaatttcaattttgaatagcacatggcaattttcctcttagagccagctagctattcagttaactgttctcccacctcaggatggtattaacaagaacaggacagtatactaaggcactagttcccaaacattactggaatcatctgggggtctttaaaaatactgttttctgactcctgtccctggataattcagatgtaattgctatgggacgatacctgggcattgagatttttaaaatctcccccaggtgattgtaaggtacagcaaaccttgggaatagttgtactaactgaagattgaggcactggaataactaatgttgggtaagatagggtaagaactttttcgcaataaggtttgcagctcttgggattctcacttgataatgctgtttggataaaccatcatccaagtttgaataagatcttatatttagaaatgaaaactgatctgcagaattagtttaatcaataaatgggaatttttaaaaatcttcttggcaatttgtttttatgaatcccgttgaagctgtgtctattgactacctaaatctagatcattcttaatccagtgtgtaaaaaaccaggatgacacaaatgaaaaacttcaaaaacctggaggtcagactattttagtaatttagaaaacatttttcccacacattaatcagtactaaaagaaaaaagttaaaacctatttaaaatgtggaaaaattgcttcccaatattttaacagagagagactgagaacacacagcattgagtcatcaggaaaactgaagatctcccctgaacaacactgggatttcactgcagaggacttgaaagaccttggagaaattggacgaggagcttatggttctgtcaacaaaatggtccacaaaccaagtgggcaaataatggcagttaaagtaggtgatgccatgattatttttggtactttaatccattaggtgaaatttcatggtgcagtaataccactgttgttgtgttcctacttttgtggtaaatgtgggtgtttaaaaaattgtttctccaactcctttgagggtgttctgtgtagaggtttcttattggtggcacattttctatctctttggaaacatgagtgtatgaagtgtgcatgttgattgcatttttggcatgatgcattaacatgttttaaacttcaggcccttctactgccaaggtgagttcaggctgggcggctgcacccctgggagcagggcagtgctgcactgagccaggcgggagctggaagaagacgcagcacactgggttgggcaaggtgcggggctagggctaacagcagtcttactgaaggtttcctggaaaccacgcacatgctgttgccactaacctcaaccttactcggtcctgaccggctcggcttctgtttgtttatttcatctctactcagtactgccctgttccctggttttaaagttgtactgaaatgcataccttgtgataatgttgtcacattttgtccttattgtgtcgtgccacttaatatgttcattaaaaaaaaaaaatggccagaaacagagatttgatccatagacaatacctggcaagcttatgctggtacctgtaaagaactggtggtttccatctgactcctagtttcatgtaattgtaatttattcatttgtttgtttagatgtttaacaaatctttgctgtatgtaagatatttcaggaaaatcagcaacagggggaacaacttgcaaaaacaaaggaaaaaaagctagctgtggccataccctctctgagcttaaaattcctatgggaacaaaaatgtttcagtttacaagaattcagaatggatttgcatatagtccaagctaatcatcttcctattagtgtcctattttgagagtttgtcagagtggttgataagagtccttagttttttcttgacatttgagaatgaatttaaattaaaataaaatgctttctgtgtagaagtctgttgtgagccaaaccttactgtaactattttagtatccttcactgttgagcatttctttttgctgggtcatatgaaagtaatgttaaattagtggtagggaaaatttttatgattctctctatgggttcctaacattgtttttggctgtatttttaaaatgtggtgagaactatagacttttcataggcaggtgtatatacacaacattttgtatacaaaccgtagacctctaaagatgcacaggtgaagaactctgcattatgtgttaaaataaaatgttttattggaatgtgaaatgatttctgtattcctattttgtgccactgcagtgtaagtggaaagagtcattttatttagactcctggatgaatgttgtgttgtccctttgtgctacctgtgtgtgacatccagttttagttggctggatcttaagggaaaggtttcctatatagttaaagttgtaaacttttctttcaggtactagggaaagtaattttaaaaaattatttcctgctttttacagtttgtgttatgtgtgcttcaactttgttgatgaacattattaaacattttagtaatatggattgattttagccattgttaaaaaggtcataaaggtaaagagggtacttccttttgacacttaaaagtttttctcactgattaatttgataatattttgggttgtataatgcttactcaagttttgtaggaattcaagaatgaaaataggaaattgttgtccatcatttgtaatgttacattatcagtggctactggctactgtgacagttccagttgggatgctattaaaaatcccagctgtacttgaagaactttcaaggcagtcatgagacctacaaactggttgctgtcacatgtatacccaccacatggtactacctagcttcgtttaccatctcgaattcttgaacaagcatagcagttggggatgggagaggatggcagtacaacacatcaattaacatatagttgaggagtacctttggattccatgacttcattaatactggaagaataagtgtttttgcattaatatgcattaaaatttgataccaattgatgacagatgtatgccatctctgaattaaagaatgcatttattattggtttcttcaaagaagaatagtctttcatcacacttgagagagttcattcattcctcatttaggtacattgactggattgacaggcacaaatatacagaatcaatgtatgattaaggaggtgtttgatttgagactttacggttttaaaggaaccatgagacggtggttcacacagctgagagctttccattgctgttggtgaaatgagaaacacgcttgaagtaactctgtgctaacatcttaatacacactttgagaataaagaaggattgcattattagatgttaagctggaaatgatccttaagatttacttgcaatatctgtagaaaagtgaactgtgatattagcttgatttttttctttgtattattcctcatttttagttctgaggaattccttccccaaatttattttgccatatataagaaatatttgaaaaaggtgacttcttagtaaccagagttaattaccccaaagacttaatctaaaaatcagttttgatataatcagatttagtgaggtaacattgtaagagttatacttaaaacaattttttgatgtttggtttgaggacagtctcccaagctatcggtgagtttctgcattaggacctaagatgtgaacatggtttaccctttagttttaattgcacgtgcttgggaaaagggtcttgctctcctgtgagtgggagtaatttgtatacttgtgcctgaatgactagtcttagggctgcctagggcaaagccagtgttgcctctggggtttcttaaagctcagggagaacaaccttcaactcttaccagggatttacttctaactgtgatcagtatcctttacaaataacatttatttagtgtcctgttttgcacggtggtggggtaaccactgaatgaaaacattagacatgaacagtcactgtcctctacataaagtaggtgcctgctcagctctctggcaggtggaaatgggagaggatggcaatacaacacatcaattaacatatagatgaggagtacctcatctatatgttaaccagctctctggttaaatgtagcggggtaaagcccagagttcagaccaaatgtttgaagaggcagttaggattaggtttctgagctagggtaattcagatctgggagaaacacctagcatcatcagtcagaatcaggatgccacagaaaatctagggacacaggagaaaagagagtaaatgaaatgtcacagcttagaccatgggcttacaagctcagatggctgacagagggaagaatgactgtaagcctctgatgcctgacagtatattctccacctgactctgcctgcagtgtaaaaaatcctgcatgcctagagtaccagcttccctgttgttttctagcagactcatgtccagattgacttcttgaaggtatgcatgcccttttcatgtttgtagaatatgtgcgaaaaaccaaagaaacgtgaaaaagtaagaatgaaaatgagagggagtataaggactgaagtacctgtcactaaagatgatggcaggcagtggaatctgaattgttgtgtgaagggttaatactgtaataaagctgtcatctcattgaagaactgaataatattgagcaggtaggtgggaataagaatgtgtcatgttaaatttgtcattgtggatcattatgatgacttttcagtcttctgcttgagaaattatctgggttaatcaggaaaaacagatctgttgtttgagggtaggtgcataggccggactgagttagcaatgtgacctggtatgcaagagtttcaagtattttctttctgttggagatctgcctaacttgtcttgttcttttgaacctcagctctaccctttcacctctactgtttcattgatgtgagtcttgctgattctggcctgttaacctgattttgattcctgcaatcctgcctctccttgattatttggattttgactttagtgtccttgacctggagttgagacccagcctaatcctgatgcttgatagtaaggactagagccctctgctgacagtatcagcagcccacagctcagctgttccctgagtagaacggaactttaatctgctggttgagtaggcctccctggtgtagatagtatggtgagtatgggaagtcaggtatcagaaaagtatggcttggcttgttttcctgccactggagagaccatgccacttctgtcaaaagttccattaccaaattatttcagtggggattatgatgatgaataatgatttgaggaggttcattttagtgtttaaacattggtcttgcatgttctgaaagcactagaatgatactgggatggccttcaattggaaaagttcctttttgatggcatagagtgctttgttaggccattttattcacttccaaagggccgcagtgatcatatttgattatccaaatcacctatgggatgcagatgtcatggctcttttgtttagaattgagactgtagtctaatatcttaggccgtcgttcggtcagatcatgtgacttacttaaggcatctgtgattgagctgtattcttttatgcttcctaatattgcttaaaagctgtggtggtcatatgaaaagtgtaagtagagcatttccaggaggagacatattcaaggggtgtggcagggctggcctctaggcagccttgattttgaactcaggttgcttatgtagatggggttggaattcccagtatacatgtgtgcttgttttgctgtcactccaagttaatgtttttcagactgtgagtttgttccattaacagaattggatgtgcaacccaagaaataaaacagccaaaatcagtactgttcggggttatgtgagggtgggaagcagactctacctgcagccatattggaagcccttggggcaccagctctgaggaattaataggggtacaattaagacagtttggaaatggttgctctaggtgaattttagtcaatcattatatgtttttgaacattctaaagatctggtttctgaaaccttctaccatcacttggttaaactgaatgaattttgacattggactaaatcccaacttacatagttatctggagaaaaacctgttttttgttttgttttgttttgttttgttttgttttgtttttgagacagtttcactgcgtcgcccaggctggagtgcagtggcacaatcttggctcactgcaacctctgcctcctgggttcaagtgattctcctgcctcagcctcccaagtagctgggactaaaggcacgcaccaccacacccggccaatttttgtattattagtagaggcggggtttcaccatgttggctaggctggtcttgaactactgacttcaggtgatctgcccgcctcagcctcccaaaagtgctgggattacaggtgagagctaccacgcccagccaaaaacctgtcttaccatacctcactctgcgtgggtgtcatttgaaccagtatgtgatatatttcctgcatattttctatcattctttgtcatcttatggctatgcctctgaaatttgttgtatatgtcagatttctattgttacctcactttattgtcgtaagtactgaaatgatgatctgtcatttatggtcttcagacccttaaaaatttcagtgctaagattgacattgtttctttaaatgtggatgatgtggttagtaaagaggaagaagatgataccactcttaccaaggcatgtcaaacttgttccattaacttggtcctcagggcagctcttcccataatgtaatataacacatgcttttggaactgaactcccaggtgctctgataatacgtagcagaaggtaaggtaaaaggaattaagtggatctcagtatccccagtgagaagaatggggtattactattaattaattaattaattaatggggctaagatacaactgagagtttattaaattgattttaaaagacttgaatgatttttgcaattaagaattagcattctttcttctgcccgtagtaaaatcatatatgctttcacaatttaaaataattgacttaacagacacttattttttcacaggaaagaaagatttacatctgtgatcagcattctagataatttgcttgcttcttttgctgtttgttttggttaatgttgccatctgctttgaccttattaatgatggctttgtgagatatcatggccattttcgtgtgtgatctatttagaagactctagctgataaggaggaactcgtaccacaaattaggaaaataagaatacctaagattttctgcagcccagaggaaggtgataggatattgatgtgctgctatggtttctaggattttccaactttggtttctaggattttccaactttgtattacaactgaattctggacatttttgctgggaaagcagcatatttgtagggttcagaatagtagggacactggaggagtgtgatccttgctctcctatcctctacatcactgactttggttgatctgatgtcaatcattgactagcagtggattccccttcacattaatgacagtaaccttaagagggatctttagcagggattacttaatgaacaatgaagggtatgtttatggcatagcagtattggtgtttgtagatcacagaaactggatgcgttttcaaaatattacaactgtgttgtaatattatatataaattatatataatatattacatataatatatattaaatattatacaatattaaatataatattaaatatacaatatttaatatattatctataatatgtatgtaatatataatatatattaaattatatctaatatataatatatattaaatatataatatataatatatattaaatatattatatataatatgtaaaagattaagataatctttgttcttttcttcttttgatttttaatgctgaacctttgctatatcactctttattttctgtggagaggaggtcccatgtgctgtgtttgctcatgtactagttctaggatttctgcatgggtaattaaatatttactaatatctacctggtacaaaaggtggacaactgtcatcatagggagcttttgatttgcttcttgtcttgggtgtggtggttttagccatcatataattggacaggacaattggcaattacttgaaatacagaatacagattcttttttttttttttttttgagacagagtctcgctctgtcacccaggctggagtgcagtggcatgatcttggctcactgcaagctccgcctcccgggttcacgccattctcctacctcagcctccccagcagctgggactacaggcgcacgccaccacgcctggctaatttttttgtatttttagtagagacggggtttcaccgtgttagccaggatggtttcgatctcctgacctcctgatccacctgcctcggcctcctaaagtgctgggattacaggtgggagccaccctgcctggctcagaatacagattcttttggtaaccttagatgatagtaggtgcttatgtaggggaacaagccccctgcactgaagtatgggttttagctaacctagttatagcagattccacatagattgctgaagagtaaatgccttctggtattctgattttggttggtggtaaattggaaatgatgctttgccttgctaatggccaaattactagtagcttgcattattttatcttgtgtctatttgttttaattggtgcctggaagaatctctaaagccctacactgatttcctctaatgattgaattcgttaccttgctgagtttcattgtgtctgagtcctaatttctgatccaggaactcacctgtcttttactttggaatactctacctattcctaacttctctaagcagctacaggtgtacctgtgcagcagggagatgtatctcctactctgctcttactgtctttttatactgccctctcggacactcagctgagccatacaaacacctgacaagaatttgtcatgtgagaatttagagatctgccaggactgatggtcatgtccttccatgtcagttttcccatttcttatgctcctcacatctcattcctccatgcattgtctccattttaaaacaaaacaaaaatagcatcagttagaattgatagccattttgtaagtttatttgattatgttgctgttttcaagtgtgtctgtggcaccactgctttctaaagtcattttctggactcctcagttcttgattccttacatgtttgctgatgactcatatcctttttgcctagaatgttcagatcctaggaactgacatctgtcatgtcctccgtagaacttctgtttatgaagtgcatatatgacttgtcatccgatccttttttactcttgagtcttttgagtatataatgacctattattttccctttctccctgcaggaatgggatcaggtaacccagagtgcctcttcacatacattgttcaagagcttaacttggtaggaaggaaaactgggttatttgggagaatcagtagttgtcacatcaggacaccggcagtcacagaatgggtcatttcaaggcaggccctggtgctttgggataaggtgtgtgctgacctctctagtaactgagatatctttgagcaccctaacatggagatgtaagggttaactctgaatcagggtgactggcaaggaccactatcagaatcagccaggtatttattgagcatctaggcacaatgctacttggtgacctgcttcttaggaactacaacgtgagcctttattttgcctcgtctgcaactccatccttagcctttgcgttgtcagcctgccttcctttgccacacttgagtcttcctaaccttaccccttaatagcaatcacttcatcatcatgcgctttcccactatcccttctccctgtctcttcccacccatgaaaacaaatttagaaaatgaagggaaataaacaaacaaacaaaaagtcaccattatgatgggattgaggcataatatctgagtaagaagggaataaattagttttccttgacagtatatactgcctgtttctgtccatcctcttatttgcttctttttctttgctcttccactccagtccttaagcgagtttagttttattcgttcctcttgtcccttttcatgataacaatgtgtcatagtctgctttaaagtttttcatacttaccgatgttagttttattgctagtcattcatccctgatgagcaccaacaaattgtatgtgagagatggatttggtagggtttggatatgaggctggagaattgtgtcactgtgaagagagagctcccctggagatctcagtgtaaagttggaggacacctagaacagcaccacatttacattgttcttcagtatcagtaaaagagttatttatactttaaattcaagttgttaaaaatggaggcattccacatgaggctaaatattattcaagattttggtccatcgatgttataagctgtcaacatttaaatctaccaatgacttccaggtgccatgttgcacaaaaagaaggaaagcagcctttcaacaacttggaatttgggacatttctatatgattgggactgttcaccaagtggatgttgctgtgttttgtgacgagatggagtagaggacaaggggatcatttgtaactgaacatttttagcttgtcctatgggacttgttaactttctattaccgcggcctaatccatacagaactcccaacaactaaatttgtggctgatccaaccaatggcatgagttggactgacagttttagaaaaaatacgctttttggaatttttttttaattggacaagaaccatgcataatattaatagtcttaaagccagagaactgggaatgtaatctttttttcctgtgtctctaagtgactctcaattggagtgatgttggcatttctgacctgtatctacctgctgtttttattggcatttacctgctttattgggcttatatgcaatcttgaatacagatttggacaccaattaaaaaaaattaacttcaagtttataaatttctttactatagaaaactacttatatatgtagagtagtaatttttgttttgattttcaatgttttctttatgttatattccaaataaagtaaaacttgaaataatctgaaaatactttttattattgggaaagagatgtggattctttttcaagaaacacaatttaattttcctggaagcgtgtaataacttaagctaagttagtaaagtagtgttaagtaaaagagctcagtaaccccataatgaaaaagaatgattttgaaaataatataaaaaacttaatgttcttgagttgattttcttaagtattttatggtttcctgtagttttcattctactatttactgccagggaaaaaaaggtttgctgagctcaagtaaacagccttatctaacttttaaatttatataaataaatgaaattttcctgctattcaaagttttttatcaatggttgttgcttctgaacattatgattatgaggatttcaagtcatataattggcgtcaccttgttacttccatttttctgtgctcttaaggacagctttataaagggaagagaagtttgttcttattgatgttcaatttttaggtagttatgctcctttaatgttagaagatcctggactcacttgattcaaatgtagaagtctttcccatagatattgttttgatggttcattagaaaaactttcttggtagtagctttagtctcttaagtattctctaatttgaattgttgattgtcattatgtattctacttgagttatttattgagttattaaaatcactaatttgaagttactgctattataggcatgtgtttgtagttgatccccttttggggtcctttaggccttttgaaatagtttattaattcctcacatatgataaatgttacagttcaaccctaaaacattagtataattaagagttagcaggtcggtcacagtggctcacgcctgtaatcccagcactttgggaggccgaggcaggcggatcacgaggtcaggagatcgagactatcctggttaacacggtgaaaccccgtctctactaaaaatacaaaaaattagccaggagtggtggcgggcgcctgtagtcccagctactcgggaggctgaggcagaagaatggcatcaacccgggaggaggagcttgcagtgagccgagatcgcgccactgcactccggcctgggcgaaagagcaagactccgtcttaaaaaaaaaagttagctgtatttgttcaattccaaacaattcagatgcaataccagcagctacttttctacctactgccagatacttagacaaaatgttcagagaatgtggggaggtgttgatctcttgaaaagcacaatcaatttcatgttagactagtaggccattcagctgctctgtgttctattttgtactaaagtgacattaaagaatacttacagatgaataggttttcctgccagtgctgatgatctcaaagatagagctgtgctaggaactctctacattctgattagtaacaattctgtcagagattgtctcagtgttaggtatcagtaagatgttggaacttcagttaggcctttagatcatgtagtccatatatcctttctgtagctacggtagggttttcggacacaggctcgctcccaaaagtcagttattgatgataactgttgaggttttgactgtaatatgcttcctagttgaaatataaatatttgtacaaatgtgtatttagcataccacacaaccagttttgtgaaacaaaagataaactagtaaagaggacaccttttaaaaatagtagtttatgtgtgttagtatatatccatttgccaatatattcatactagtaaaaatagaaaaaaatacatttgttaacaccttttaatagtgagaggtagaaatcttccccaaccaaagggttatttgatttttcttctctacttgtctctaatattaaacaactcttcgtctgttttaaatttagatatataggattattaagattcttttataaataattaccttcctaaattagcattttcacagctacacttttagagttattttttaaaaaacaggtataaaggtagaatatttacaaaaattattacatcatgctttgaacaaatacagatcacatctctgggctattttgacttttaaaaatatcctttttgagcaaacatgctgaagttgatttaaaagtaagattattaatccataaactatgaaaataatcaaaatgagaaagaagggaaactttccttaacgttaatagaactagtcttattttgtttccatttttcattcttactttagtgcttgtttatctgagcattgatatttaatataaaagttgtaggtaaatctgtgtctgtaacatagatgccagttactaaattttatttgcttatgaaatactgtaggtagcaagctgtaaattttaagtagcaaaattaaatttgtttggaatatatggaattcctcaaaaatgaaacggagagaacctacttctgttccttaaacaactgcttattctcatgtcacatgaaatacatcttctatatctctttgtgcctctggcttcttttctgtaaaatgggctcaagaatttaattgactgccttcatccctttcaagaacatttgacagatacttcgaagtctttggaagacaaaatgccaccttgtgtattttttgatactaacttgccttgtaagtacacactatgtattgtacacagtggcgtgatgtgacattgtgaacttttttatgagaacagaagttgtttgcatgctttgatgttaaactataattttattattatttttttataatttctgaacatgattctttcctatattgtccctcccaacacctctgtgttctatactgttcctgaataagaggtgggaggaggtggggtacttaatgttttctggcagtctcttagaaatgtgcaaagaaattgttgtacagcttggttaggaatatatccctggtctgcagtatatggaggagcgctttagcaccttaggaatagacaaaaagagccctctgtttcctcagttttaggttttcttccacaggtttatgctgccctacatgctgactcatgggttggagagtcaggtagaactttttgtttttaatgtatagaaagtgcagttaaaggacagagtcccaatctaggattttggagacctggattcttgcctggtgcactgctcctatactagtattcactttatccggttctggactatttcccgtctttatgaatgaggacactgtggtatgagtgtcctcatgagtgaatgagtgaagagggatgttcttgcattgaatgcctagattgcatacaattttgaaacggtgattaaaagtatgtatacagctacctataattattcatatgaaactgttaaaactcattatcattttctttatatttgcatgtgggggttaatttttactgcctaagaactttgttgcataactcccaacattattagtaaatgctcatggttaaattgccctgtctcctttaaaggatttctaagtgctgtttgttaaactttctgtgattaaagtaattcttgtgaagtataaggaaagatgataattttcatatctggtatttgtgaagtttggtaatttttagtctcgtaacggtttttctctaccatgagactaaaaattattggtgtttttgacaaaattattgtgtttttttgacatcttttgtcattcttttccagagaattcggtcaacagtggatgaaaaagaacaaaaacaacttcttatggatttggatgtagtaatgcggagtagtgattgcccatacattgttcagttttatggtgcactcttcagagaggtaggaataaactgggttttagctgactaatgaatatctaattgggacaaatgaagatggcaggattcgattctattcttaaatgccatacattagtaataagttaatatctcagtatcttagtgtttaaccatggtaatttacatattaacttctgactctttttgcggtggtgggtaaggggtgaatcacacgtgtgtttgtgtgtgtgtgtgtgtgtgtgtgtgtgtgtgtattttagtattggtggctgtcatttgtaaatctcatacaaatattttctgttctttaagaacctgaaaaatcagctgacttctaaatatcagcacttttgctatagttttagattttcattgggccttgagcaacgcctcccccccccccccccccccccgccgccaactttatattttaacttttactcatctgtcatcaagtgtatgtctgcatttaatataaacacttatgtgtccctgcccataatcctgaagtatacccatcagacatggaaattaacaattacaatataaattatttttttctaattctcttatccagatttttgtgtagaaactaaagctctaatttcttggtctcataatcatgtttcttcttttggcctctggttattttgtgtcccaacttgggttatcatttctgcctccagctctcaatccacttactcatttccagtcatccagctgcctaaaatgtggaagtgagtttgggctaggggtagaactggagctgtaaatgaattaatacattatgatatcctagaccgccatcaaaaattgtgatacttagttgagtaggacttgaactgaactgctaagcatttcaaatactctctaaaaaaaatacctttctcattttgcaaatgttaggatgaataaccgagttgttataaactggtaagaaaaaccctcctgctctcttctttttgggatgggattatagagtgtatccttggggtttttgttgttattggctttaaaattaatatatatttttgaaacagggctgaatgtagcactgagtagaagtatatgcaatcttataattggaaacaatgttagaggttagttaattctaaacctaattctgaagtttttgtttgtttttctgggctcttactaggtaactagtaacaacacattctgcttcatgacagagcccatttctttgttgaatcactaattgttaattctcaactcgtagtttttttctattcctgtctttaaataatgagaatattcatttttatgaccagatatactgaatttattaattttcttccatcatttcacatcagcattccgttacatcagtatacagtcatgtattcatgtgcatgactgtatcttggacctaaatattatgtaatgttattctaaatgtttggaactttcttcatgttgcacaagaatcttaccatatcttcctccctttattcccaactatgaacttttcttcacgatcattaaatcatcacaccatatgcagaacaatagttaattagttaattagggactgaactagattttctctcctaactagattctgtggtcaactttttcagtgctgtattcgttttcattatagactttccccagctctgcctgaaccctaaatcacctccatagtgctggaatataccaatttatttcatttgttcatttatttaatcattcatgtaccatttacacacctagccttgggctagatagtgtgggaatctgattgtatgaaaagaaagcagagtaagtcatattcatgattgacaaagatgtggaaacaaagcacggaagcttggagtggtgtctgaacaatattcccatggttttgttatcatggatagctgagtcacatttggttttatgtctcagaaaggttgaagggagttgacatatgcagctgtaaacactaacgtctgttgaatgctttgttgttttcacatatgttttcttcccagtaatcttcgggatttggtggtattatctatcccctttttccagataggaaaatgaaatttagtgtgtttgacaaaagttacacagccaacaagtagcagagatgggattccagagacagaaatcttgctgttccttctattttattagaagtggtccagatatgaagatatatatatgctttttaaataagatttttgacaggataagatgtgtgataaggtgaaggcttaggaactacacagttaagctgtacaaagacacaaaatacctaagtagatgaaacatgaactttcctcccaaatcagaatgcagtctgtaataggtactttctgaataataagagttttagaaaagcagaaagtaacaacttttacaatagtatgttttacaataaaaatatagtttttcaatagttttacaataaaagtgtagttttacaataaaagtgttacttttattagtcacctttaaagagtgaatagtaaaagtgtatttcccgaagttacaaaggttaaaaatattaaaatggccgggcacggtggctcaagcctgtaatcccagcacttcaggaggccgaggtgggcggatcacgaggtcaggagcccgagaccagcctggccaatatggtgacactgcatctttattaaaaatacaaaaattagccaggcgtggtggcacatgcctgtagtcccggctacttgggaggctgaggcagaagaatcgcttgaatccaggaggcggaggttgcagtgagccaagatcatgccgctgcagtccagcctgggcaacagagcgagactccatctcaaaaaaaaaaaaaaagtatgtgtgtatgtatatatatatatattttcatatatatgtaagtaataaacagattgaataagactttaaagaaacatttttgttttgcagttgatgacttaaacatgcatcttttttggtgacatgaccttcagttccaataatagacacaaaatctgagttcatgaaaggaaatagtagaaatgaatgtatgtagtcaggactttttagcttaccttactatcactgtgagagagacagtgctttcaattcctgttactgtgagacaccctccagggatttcatttcacctaatttatacaaccactagactcagctcttggtttggttcagtcagccatccatcaaggagcttatgagatgttccttttctcattcttgcagcaactatttatttatttaaatttaaatgttatttaaatttaaggggtacaagtgcagtttttttatatgaatatattgagtagtggtacagtttgtgtttttagtgtatccatcacccaaacaatgtaaattgtacccatcaagtaatttttcatcatccaccccgttcaactcctccctcccttctgtgtctccaaggtctccagttccgtattctgtccatgtgtgcacatgatttagctcccccttataagcgagaacatgcagtatttgtctttctgtttctggtttgtttcactaaagataatggcctccagtgtatccgtgttgctacaaaaaaaaaaaaacatgatttcattctttttttaatggctgtcactgtctattgtgtatatatgtcacatttttaaaaatgtggacatttaggttgattctgtgactttgctattatacatagtgctgccataagcataccagtgcagatacctttttgatataatgatttatttttctttgggtagatacccagtagtaggattgctggatcaaatggtagttccactaattagagattaatcttgctgttgggtaatattgagcttctgaaagttccgtcacttattcaaagcagtgaataatccttaatactgaagttggtaacttctatgttgccactatcttcaaccatgcatacttctttctaggatggaaccaacctcaaaaagaaaagtccaaagtacagcttggatttggtttagataagttattaggtcactcagttgcacaggttcctaaaagtcattttcaggctttgtaggtaggtggaaaaaagagcttgataataattgaataatggaagtaacttttagcctatattttacaaaaaagacctaccatttatcttaacagtgctgaaacctagtatcacttaaaaatttttctaatacataaaatttgagaatttcatagcaggtaaactcttattttaaacatcttttgaggttgggcaataaattctagtgcagaaagcactgttctgagtaacttgtgaatgtagaagttcatcagattatagaaggcagtgatgctggctgaagcaagttacctcccccttttttatccttacttccacccctcttctcctttccctcttctttctccttgcaagttttaaatgcagcttatggaggtaaaattgacatctgataaacttcccacatgtaaagtgtacagtttgatatgtttgaacaaatgtatacacctgtagaattatcaccaaaatcaaggtaatgaatatgcccatcacttacgagtttccttacaccacgtaggtaatacctgccacctctctgctgtccccattctcagataaccactgacctgctttatgccattatagattaatttgtatttttctagattttatgtaaacggaatcttacagtatgtacttctctttttcagtttgtcgtctttcattcagtataattatcttgcatttatcagtcatttatttctttgtattgccaagtactatctgtaatgttccattatgcagatctatcagtttgttactcatttacctgttgatggccatttggattgttttcagtttttgtctgttactaataaagttgctttgagcatttatgtacaattgtttgtacataagcttttattttcctggggtaattacatgggggtggaatggctggatcatatggtaggtgtatgtttaactttttaaaaaatggacaaacttttttctaaggtagttgtaccattttatactttcaccagtagtttttgagagttcagcttcttccatgtctattccagcacttagtgtgatgtgttgtgttaatctttagccgttctagtaaatgtgtggtggaatctctgtatttttaatttgcatgtttctaatgactaacagtgttgaatgtcttttcatgtgcttatttaccaaccgtatatctttgatgaagttcctgttaaaatctgttgtacatttttatttaaattgggtttttttgttattcggttttgggaggtttttaaaaatgtgttttgaatacaagtttattatcagacctatgatttgcagatactgtctcctgtctgcgcttatctttatatatatctattcttcacagtgtttttggagagcaaaagtttttaatgttgatataggccaatttttaaatttgtgtattgtgcttttgatgttgtgtataagagctcttgtctaactcaagctcacttaagattatctcttatgtattctcctagcagttttatagttttaggtatcacatttatacttatccatttggagttagtttttatatatatcgagagttatatattgatgatttttttttgcatgtggatatcctttgcacctttatcagatatcagttgtccatacagatgtgtgtctatttctggagtatctgctctgttccattgatctgttgtttttctgtctttgcactgatctcacatggtcttggactactccagctttatagaaagtcttcagatttgagagtgttggtccttaaactttgttcttttaaaagttgtttcggctctttcatatcctttctattttcatgtggattttagaatccacttgtcgatttctaccaaaaaacccgaaaaaaaccaacaacaaaaaaacaacctgctgaaatttttattgggatttttctaatttgtaggtctactgggggagcattgatatcttaacagtattaagtctgttgacccttttttgtggcatctcactttattattttacatcttctttaatttttctcagcaatattttatagttttcgctgtataagtctttcatgcttttgctagagttgcccttaagtgtataatatttttaatgctaatacgtatttttaaatttaattttctcatgtgactaaatgcacaaatatcatttgatttttttatattgatcttgtgtgcagcaaccttgctaaactcaaattccagtagctttttttacctgccttcagatttactacatagatcatcattttgtctgtgaataaagagagttactcctttctttcccaattagttcctttatttatttttgtcttgccttattgcactggctggaaccttcagtatgctgttgagtagatacagtgagagtagacatccttgttttttttcctgatcctagagggaaagcattcatgtttccttcattaaatatgatattagctgtggacttttcatatatatatatttttaatcaggttaaggaagtttctttttactcctagtttgctgagagattttgtcaggaatggatgttagatttttgtcaaattctttttccagatccttgagatgtttttgagatgtatggtttgtttgttgttttaataatggtgagttatatgaattgatctcagatattaaacatagcttttatttctgggagaaatccagttggttaggatgttttatcttttttatctatcattggattcaatttgttaaattactaaaatttagctaatttgctaaaattcatttaaaatttttgtatctatgagagacattgatgtatagttttcttttcttatttttgtctgacttgcatcattgtaatgctagcctcataggatgagttgggaagtatttcttcttcctgaattttctggaagaatttatatagaattggtattattttttctgtaagtatttgatggaatttaccaatgaagccacttgaacttggcaatttctttgtgagaatatttttgactgaatatccagcttctttcaaagatatagttctattcaagttacgtatttcttgtcgagtgatctttggtatttgtttctttgaagaaatttatccctttcatctaaattatcaaatttattggaataaaattattcataatatttcttttttattattttaatattggtagagtctgtagtgtgttacttctgtcttccctgtctccccctccctcccacttgtttctgatactggtaatttatgtcttctttttttcttcccaattagtccagctagaggtttatcaatgttattgatgatctcgatgaaccagctagctctcagttaaatgattttcttttcttttcttatctttaaaaaaaaaaaaaaaaaaaagtcagggtcttgctctgtggcccaggctggagtgcagtggcatcatcctagctcaacccaaccttgaactcctgggctcaagggatcttcccacatcagtctcctgagtagctgggactacaggcatgcactaccaccaccctgctaattgaatttttttttttttttttggaggtggggtctcactttgttgaccaggctagtctcaaactcctggcctcaagccatcctcccaccttggccccctaaagcattggaattacaggtgtgagccatggcgtctggcctccgttacatgattttctgtattgcttttctattattattttttttgacggggagcggtgttcgttctgattgtggtttcttccttttacttatttttgcttaatttgctttttttgtttgtttcttaaggtggtccatgttccttttaaactgtgaaattttttaaacatagactaaattacagaggagaaacagctacccaaatcctatattggcatatttactctttatatgtcttcaaatattataaatagaattaaagccctcatcacatttccctttccagatctcatcactaccctgagtgtttcctttaacttgtttgtttaggtcatccatatgtgcattttcccctacattttacataatatcgctttatgtattttcacatttaagtaaatggaatcctatatgcgttctttattgtacattttattcaacatagttttattcaacatagttttcaagatttatgtaaatatagattcgtaatatacagatttagttaatttattttaactgtagtattctaatgattaaatacacctttttattttatttttttagaaataatcataatgtagattgcttctcatttttttataattataaacagcacaaaaatgaagaattgttttgcatgtctctttgacaacttaggttacagattatttagcatatgtccctggaaatacagttactaaatttaatgatacaaatgtctccaactggagtaccgacttaaatttccaccaaaatttctatatcaataattgtatttggtatcagccattcctgactgttagtagcttgcttactttatagtttcagttgttaaggttacctcatgatccacattggctcctagagttcagctatcatgtccacacgaaggaaaagaaaagggaagaactaaaaggattttcctggagtcacaaaccagtggttttgtgttgatacctctttggctgcctttctatactttaaagactgggaaatgtagattttagccacatacattgtacagaggaaagggggaatggttatttagtatgccatcagcatttactgtcacagatctccttttacctggtgtgtactaacatttgataataaacgtttaatttttggcagtttgaaatggtatctcacttttaaaattgcatttccttgattggtgagatacagaattttttacatgtatttaggctttttttaaaaaaaaattgcctttgatataattctactgagtttggtctttccctaattagtttagcataactctttattattcaggatactgatcttttgtttctttacatccaaatagatgtttttgtctcttatttttaaacttttggtatgttgtccttgtttatacacaagtgttcattattatggggttaaatttaacaggtcttatcctttgtgatttgttgtttttatgtgtgttcttgggaaaaatttttttcctatataaaagtcatggagaactcttagaaaaaaagttttaaacttttgctttttgcaaaatccatttgggagtttttgtatatatatttgtgaatgatttaatgtcagaatttaatgtttttctatatggaaggccagttgtcccagcagcattcattgaataatgcattcttttgctatgatctgctttgttaacttctgtcatatatcagatttctgtctgtgcatgaacttttgcatctgtttctttggtgtatttatcttttatttgtgattgcttcataaaaagtctttgtgtagtaggtcagtatctcttctttaaaattatcttagttattcttggctctactttaatataagctttagggtcagcttgttcaggtccttgaaaattttgattagaatttaactgaattcttagattaatttgggagaatttgacgtgcttctcatcttgaatcttcacatttgtaatcatggtctgctactccatttgttcaggttattgttatgtcctttagtaacattttatatttgttttcataaaggttctgcctattttattagatacatttcctggtgacttagtttatatttttattgagaatgatatctttttattttcgaattagttattggtatatgttattggttatatacggatctttaggaacccttccttatgttaccttagtagttgagttgttcatcattctccagctttttttcccccaataaacccacatttattcacttcttctgcatttcagacctgtggtcatcctgttttctgcttgagcatgacagtcatgctgctgtcactacctttttcaggcagctcagagcatttcattttttaaatgcagctcattgccattgtgttgtttgtatgaccaaaaggaactgtcagagagataagaaggttacattaggttatgttccttaaaaatcacaaagacctctctatctcattgctcttttctgtccccccttctcatcttcagttctcggtttacttgttacctttattctcccactcccatgtccatctttctcttttatttgcccacatttcccttccttctcccttccatttggtaactatagtttttagcacctgccaggcactttagtttgtgctttgcatatgttaactcatttgccctttatcacagtccactgaggatggtggggcagtctcatttcatagctgaggatgcgaggaggcccaagcttatataagtagaaagtaggagagcttggataatgtcaggcttttcagactcctaatgtcatttttttttccgctttgctatattattgaggttgtttctttctactgtttttataagtggatgaagtaaatgtgctgtatgtctctaataagattttttagtaaacctatttagatagtgtctctaaaataaagctgtgtctgttttgggtggagggtgttactcgatctttcatgatagccattctcatagatcactctaaagaaaaagagatttacagagagaagaaagatttaaatgcagaaataataagtaaaatttactacgtcaaatatgctttacaaaaacattatgtatagccatgtatctgtgaatgttctagaaagtggtccttttgtaagagtgcatggcaaacgttgatagaagaaacacattagggacagtggattctattcatgggtagtgtattgttctgggcaagtaattttacttttaacaggcattaatctcctatataatccaaggataggattgattatataattattatataatcgaaggataggagattaatgggtagaaaatctttgatgatacagctgtatttataaataagtaacaacatacagaactgtataattttttaaaaatcattttgatagtattttcatttttgtaaggtactttgtagttcttgttcatctgtgtatcctgtacttttacagttataatcatggtatctacttttattttttattttttcatgactcatgcatctctctcatgaactgtattcattttcaaaaaaattgattttagataatctctttaatgttgttgtattcccttttgtgagatagttcctcggtttctagttttgttttgttttttctttttgtaatttatggaacatttaagttacattcccagtcataggatgattctataaaatggtatcaacacatttatttctgttttattgtcaaattgctttcaaattggtttaaaacaatctataatgcaagaaatgtttgaatgattcagtttaattatagccagcatccagtcatttaacaagtatttattgagtctttgttctggcagaggttacattctagtagggaatatatgagacaaacataataaataagtaaattacactttatattagaggatgatgaaggctttacagaacagagcaggataagggagtgcctgatgggatgacttgcgctttgcatcagttaaagtaggcctcactgagaaggtggcatttgtacggggtcttgaggcatgggatttactttatgtatttttgtctttttcctttttttttttttttttttggctaatttaagaagtttatgtagtctcttaagattactgtcatctattttcattgttagtaagaatggttttctacacatttcctatttttttttctattttggcaaaatttgaaattttaatgaaagcacagaagttttctgtgtaagcctgtccctgtccatacaattaaagagtggggaaaattggctttaactacattgtttatgtttaaacctgagtagaatattctgttgaaggctttaacaagaaaacaaaaattattactagtttgacatttgaaataagcaagaataagattgctcctttctattgtatttccattttaagtaaaggcaaggtgatatttaagatgtataagaataacagatatttgttattttatagggtgactgttggatctgtatggaactcatgtctacctcgtttgataagttttacaaatatgtatatagtgtattagatgatgttattccagaagaaattttaggcaaaatcactttagcagtaagtacctggtctttaaattattcattgtgtatatagttatatagagatgctgctggagttttgaatgcacatatttgagtgtcactcacagtaccttcctgaaaataattcatagttaataaccagagacaaagtcacttctgtggggtagttaacacaataggtcataatggtctcgataaatactgccaatgttctttccctttgaatctcaatgagtcataacagactgttctgtaaataaagctaggaaaagcaattttctgttcattttttcctgttgctttaactatttttaaataggttatattaccacagttatcctgaaattaatcagaatcacagcagtctccttgaagccccataattgaagcccttggacaaagtttgtttactgtgatttaagattttggttactccataattgaagcccttggacaaagtatgtttactgtgatttaagattttggttattcagtctaaactatttaaaattttgactagcagtttcaggggccagtgttactactaaatttggttaactcacttttaccagagtaccaaaaaagaaaatagctacttttttacatatgtgtttatagttttgaaagtgaattgatcactttgtttcttgctctgaatcttaattttttttcctaaaggaaaaagataatttactttttatagagcaaaattcataagattcttagaaactcctgagaatctgagctaatggcatgttctaggttagttgatatataaactaaatcatacaggaaattgtaaaatagatactttggttgcatgtaatttcctagctcttccttacctgcatactccccctccaatgtagttcaccaagatatatactctttcaaataatttcataaaaagattttatgaaatcattttatttttaaattttataaaaataattgtataaaaagaagctaacttagactagaaacttattatttagcggggtatatgaaattttacaatgattagtttagccatctctctctaatatattaaacccgtgttatcttgaaacttactatttgtaataattataataatagaaaaatgataatagctaatggttattaaatgcttatttgcatcaaactatttgtgacattaaatcttcatagtaactctctgtggtaaatagtgttacctcatttttatgaatgataaatctgaagcatagacagattaaataattaatatgctttgaagtgtgtaagtggtaaataatctaaatccaggcagcctgatcccagaaccctgctcttaaccgctgtataacagggtgaccatgaaattagaaaacagaaaattattttatcatatattgcaatataaagaatatatactgtaaaaaatgatttattccatatttgcctaagtcaagacttggtgatcactttatatatattaagcacacatgtaaaatactttgtatttagtctcttcttgctaattaataaaccagcaaacaagcatagctattcacaacaaatttatgtgttctacatttcttgtacctagcagcttgacgtcagcaaagacgtcaccttacagcaaatagttggcctgttgtttagttctcttttagtttgaggttgtgtctcttttccttcccttcctgaagaaatgtgtaattttctgatcatgatcagtgaccaggcaacaggataaattcccacagtggtgaacagagtttacactagctcttcaaacatcaccttgaaggcttagcatccaatgagggtggatgatgatgaggaactgagagtttagaaaacttttttatttactactggacttagaaattgaaatcgattttgctgcaagttattactcttagttgaaatggaaccaactcagtgatcattgttgtcctgtttttatttttgaacattttagaggccaggcacaatggttcatgcctgtaatcccagcagtttgagaggccgaggcagaaggatcgcttgagcccaggaatttgagatcagcttgggcaacatagtgagaaccctgtccatactaaagatgtaaaaagttagccaggcatgcatctgtagtcccagctacttggcaggctgtggtgggagcgagacccagtctcaaaataaaaagggaaaaaaaaaaaggaaattttaggttggagataggaaaaaagataaaattttaaatgaattattaaacaaattataagtctaagttactgggttttttgtttgtttgagctatcagggaacagcatataaaggcaactaagcttttagatctaaaattattcagtatctttggttaacaagaaatgacaaaatattgaaatattaagcttaaaatgtatgcagaggactacacgggatattacttgtgataaactgttgtgctgtttgaataaaaagaaacaagttgtttatcccatctctcctttttctccctagactgtgaaagcactaaaccacttaaaagaaaacttgaaaattattcacagaggtgggtatggattggtattttttgtaatagaaattaacttttttctcctaattggtgaaacggttattgaaaattacagtgtcactgtataaactttcctaaaatatttgtatttttagcaaaaaatgctttatgtactttaaaactctattactgctatttttttctttgggattcaataaatttcagtctatcttagtatgttggacttagaaactgaaatagattttgctgcacattgttattagttgaaaaataattattcatttgcctgatagataatgtttttctgcatacaaataaggcatcgaggtggtcctgtggacattcaaagaagaatctgagggatagtaccctcaagcattttaaaggcatgctatccctgtctgttgtttcttcttcacattagaggatgtttctaaattgagagaaatcttttaattagtattataagttgaaatttctctaaagcatgttgtatttgtgtaaacagtgatcttgcctttattagatacatattcaaatgaagcatttgatgtagttgaaggccagacctagaaaagtagtaaccctgtgggaatcctgaatttaatctggcaaatagatgaagtgcttgctttacttattactgtgctagactcagggtaatgaggtgctggctttgaggaaacacaccgaatcactacccctcagcaaatttgtaacggaaaaacctgacagtaagtggcagtgtgtgatttagcctgacagtaaataggaaggaaagtaaagggtcaaaatgaagagaagtgaaaaatttctaattctgggagacaatttctagtggttaaagaaattagtaattgggccatttatttaagttcttttgtttgtggttgacactaggccactgaaattagtgaaccttgaacatcagtaaattttatttaattttgtttggcttaatgcttgttagaaataatatctttttttcttttggcctaaaattatgtagagttaggtccctaaacaaaattctttgtttctcttgtatttcttcttgttcttgtcttgatttttttttttttcccttctttgttagctgtgttctataattatgagagtagcacctttgaggcatttgatagttaccttagggatatttactgatcacagtaaagcaccaaggtactgcctggggagtagttgaataaaataaaaaaacttcagaagtaacttttattgttctcttactaaatgaagtgatgagtttatagccatcttttatcagttaggatcagttagcttttttgttggagtcagtgcttttgattacaagtaatagaaaatcctgataactctctttaaacttcagggaaattcattatctgtcataattagtccaaagatggggtggctcaaagcacaatatgctcctcttccttctgtcctccttcatgtgttaactctgtcctcagggtagtaacaactagagcagttcccactatcatgtctatatgtggctgcctcgtgaagaagaggtgctctcgtgctgtgcagctctgtagggagtatggaaacttttcccacgtctctaataccttttcttggctcattcaccagaagtgcctcatgcccttaaaccagctactatcaagaagcatgagactacccttataaaacttataccagccaacagccaggttttcgaggtgtggatgttgatgagaagagatacttcaataaaacacaggttctgttagaaagtatggatggggctgggtgtggtggctgacacctgtaatcccagcactttggagaccaaggcagctggatcacttgaggtcagaagttcgagaccagcctagccaacatggtgaaaccccatctctactaaaaatacaaaaattagccaggtgtggtggcgcatgcctgtaatcccagctacttgggaggctgaagcagaagaatcgattgaacttgggaggcggaggttgcagtgagtggggattgcaccactgcattccagcctgggtaaaaaagagcgagactcttgtctcaaaaaaaaaaaaaaaaaaaagcatggatggttaggaatggatgtttgataggcccacagctgtttcggtcatggtaagagatctttactgaatttttttgtggatcaccttctgagttacatttagatgttttctgcatcctatattttaaaaccttattttttattcattgagccaggatagtgacaaggacatggataaaaggactgagctatggatagagaattagttggcacatactggtagtgacttgattgtcaatgagaaagggatttgacattccttatattttgactgttatgtaatgaatctggactaagtaaatgaatttgtaagcctcttgaaaacaatttaatgcctaaatttcttgtgaaaattttttttgatattcagtttttaagcactggcattcagaaaattgttttcctttctcattttcaatagaagaaaaccattgttttttctgtgttttataaatatgaagatgttaagagaaaaatcaatccccatctatatcttacagattaatgtttgtgaaatgacttttgctgttacatttacacaattatagttattaaagctacatgtttaaaacatgaataattattgtatgtgataaatgaagatgttttacttcttatatatctgaatttaaggacttgaccacttatgttgtctaaggtttttcaatatttttgcttaaagtgaagccttatgtaacttaggaagaagctaattgtatactgaatgatatctatgtcttgcagatatcaaaccttccaatattcttctggacagaagtggaaatattaagctctgtgacttcggcatcagtggacagcttgtggactctattgccaagacaagagatgctggctgtaggccatacatggcagtaagtgttaagtccaggccttcttgcttgatagtcattgcacagagagcctgtgctcttttgtgctggccattagtcatacggttttaccatgaaactgctagaatatttcccttaccctaaggcccaagctcaggtcctagcctctccatgaaactttgctaaattatcccagtcagctcctgttttcattgtcttgctttatttctcttacttggtatttagcagttgtggtcttctctgattattgttttttcattatattgaactcaactcattaaacagatggtaacttctcagaaagttcccaccgtcccttagtgagacaaatgggaagccttgagttcattagcagaattcactatgtattacagagtctgaagctgcatattttgaatattgttagtccttttttttaggggtagatgaagcacaccaacaaatgcaaaggtagaggccttcagtattttgcaacctggagcctcttttcctgcaaagagacagatgtacactatccatccatagatatcaaactcatcttaccccagtatatttgcatacagtgttcctacagcctggattttgatctgtatttgaatgaaaatgtagtgtctgtatttcagacatttccctaggtgttaatgtctttcttcaatgttgccatggttctttggggaccagcacactactaaatgtgacacataaggttttgtggttgtttcttgaggcctccctgccagcagcatttctttccatctttgtagactgttttaaactaaagataagcttagaattgaataaaattgttctttcttggtttcctccttgatatatatgttttcaaacctagtgctataaataataaaaaagtaagagtcacaggctagatattataggtgttctagattatttatgaatggataggcttagtgctactacaaattcaacttactgcatttttcaatcctcttttggttttgttatatcttcccatatcactttttcttcagatgaacatgtaaaagcggtgtgtgtgtgtgtgtgtgtgtgtgtgtgtagacacctaacctgtgtggtaagaccttttaaacttttggttttgtggatgttgactggctgggcagatttcttgactcagtttggaagatcatttgtttatcgtgataactagggataaatggcacaatagtttcaaaggcaagaaataaaaaaaattagacatggagtatttgggaaatgtgatttacatatttattaaggataccccgagaatgaactgaaattgttatttacagttttagggcttgtctcgatactaacagtgactaaatgtttttgttgtgtgacactgactaagaattatatttgattgaagcaggctttgaaaatgcaattgcagcccagataaagtagaatattttgaattcagctttctaagaaagactcagactttctttaaaacagactttcgtcattcttgtgcagagatatgctttgcaggcccaggagatgtaagacttctgttttcttgctgaccttcatctgtggaacacaaaggctgataaactcttggcctctaatctttactggaccagatgaaattcttctgtccattctcatctttcaaagcctgttatagatagacaagaactcaatcaatgttaattttaaaaggcttcaagtggtttgacttttcttcaaatattgacaaaacctattggaggtatatcattttatttgagatttatagttgtctttagtctacaggacttaggattactcattagattgtgcaacataaaaaagtaaataaaatgtagagtttacacataaattttcctgtaaaccgatttcttgtaaacattttcccaactccataccctcatgtaggtacacagtcttatgttgcttaaccgtgggaatatgttctgagaagtgtgttgttaggcaattttgttgtgcaaaatcataagtgtacttacacaaacctagatggtatagcctactacacacataggctatatggtacagcctgttgcttctagactacaagcctatacagcatgttactgtactaaatactgtaggtaattatatcacaacagcaactatttgtgtgtctaaatatagaaaaggtacggtcaaaatatggtataaaggaggtagaggtgacgggccggagaaagatggaagactaccaggctgcggaggagactgcttttgttgttgatgaagtgagcaaattgtaaaagaggctatagaaagcacaattggtggttaacgcttattaacacagcaaagtgaaccagtggaacacaaatgtagtagaacaaacttcaagccaactcaccaagctgggaaaaccacttaaatacattgtgacctgtgtaattatgcaaaagaatggagctggattacacatggcaagttcctgcttctgggacagctctgctgacaggagctgcactgtgcgatgggagaataaaaccatgtactgcatcgtcggcacctttggactgtgtattggacctcctagtccagcctgtgaccttcctccggtagttcatcttctaacaccagctatgaattgagtgaactcttttctcgttctttttaagtctgttttgtggcactctaaaaatgcagagaaaaaaaccaaatgaccgcactgttacatgaactgtgcactgaagtcagatgagtatccctgtaggtcgcctgcagcctgcattgccacttgtaactctgaatatttcttttcaaaggtgctaaaatctgaaatctgctggtgtgaaacttgctatactgtctgaaatgattcaaatacactaattttccatactttatacttttgttagaataaattattcaaatctaaaaaaatatggtataaaaaataaagaatggttcactggtataaggcactaatcatgaatggagcttacaggactagaagttgttctggatgagtcagtgagtgagtggtaagtgaatttgcaggcctaggatgctactgtagactttataaacactgtacacttaggctacatgacatttataaaaatttttttcttcagtaataaattaacctgagtgtactgtaacttttttactttatacactttttaattaaaaaaaattttttttacttttttgtattaacacttagcttaaaacacaaacacactgtacagccgtacaaaaatattttctttctttgtatctttattccgtaaggctattctgtttacttgtttattctttttaaacttttttgttaaaaactaagacatcattctaggcctatacatgggcgcgatcaatcactgtcttctacatccacatcttgccccactggaaggtcctcaggggcagtaacacgcagggagctgtcatctcctatgatatcaatgccttctttgtaatacctcctgaaagacctgccagaagctgttgataacttttttttaaataagtagaaggacatcaagtatagtgtactgtacataattgtatgtgctatacttttaaatgactggcagtgcaataggtttgtttaaaacagcatcaccacgagcgcgagtaatgtgtcactctacgttatgagggctatggtgtcattaggagataggaatttttcagctccattataaccttatgggacaacctttgtatatgtggtctgtcgttcaccaaaatgttgttttgcagcacgagacaatttctgtatgtgggtatggatgtgccaaaccacctgaaagttagttgcagatatcatgcattttattctaaacacttcagtgcatatctcccaagaaaaagaccattcttctacataaccacgatatcattaccacacctaaaaaaaacaaacaagaatgtcatctttgagcatccccattccaaaaatgcaaagcccgaaatgctcccaaatatgaaacgttaccaacactagtgtgacccaagtggaaaattcacctgaccttatgcgatgggtcacattcaaaatgcaggtgcaccacatcttgttgattcagtgttcccaaggtaaaaaaaaaaagacccttgtggccccctttagctgcaatatatcttttccacacatgcccagattttccccacataagcatgcctacaaagggtaataaaatggcatgtatgcaggcaagatgtgctaatgacaggttccacactatacctcacatggggccaagacctacctgcattactcactgtatttttttttgttttttttgctcattttttgctcagtagcttaaagttaatgttgaaaatgtcaaagaggcctgcagatacccctagagagacagcagtttgttaaaggggataaaggggaagtgtttatgtttatagcacagaaagtcaagctgttagagaaactggacaatggtgtaaatgtgaaatgtcttacagaaaagtgtggtgttcgtatgagcaccatatatgacctgaagaaacagaaggagaaactgctgaagttctgtgctgaaagtgatgaacaaaagttactgaaaaatagaaaaacaccacataatagctaaaaatgaagatcttggtaatgtattaaaagagtggatctgtcagactcacagtgaacacatgccatttgatggtatgctcatcatgaaatgaacatctatcatgaagaactgaaaattgaagggaactgtgaagattcaacagactggttatagaaatttaagaaaaaacatagcattaactttttaaagatttatggtgataaagcatctgctgatcatgaagcagtggagaaattcattgatgaattcgccagggttattgatgatgaaaattcaacatcagaacaggtataatgctgatgaaacatcactgttttggcatgattaccccagaaagacactacagctgatgagacagcccctgcaagatttaaggatgccaagagcagaaaaactgtgacgggatgtattaatgcagtaggcccgtataggtataaatctataggaggcaaaagcttgcatccttcctgttttcaagaagtgaatgtcttaccagtccattattatactaatcaaaaggcctggatcactcgggataccttttctgattggtttcataaacattttgtaccagtgccttatgcttattgcagggaagctggactgaaagaagagtgaaagattttgttatccattgataactgttctgcttatgctgcaaccgaaattctcataaaaaataatgtttatgccatgtactttcacccaaatgcgacttcattaattcagccatgtgaccaggatatccttagatcagtgaagggtaaatataaaaacactgtcttgaacatcatgctagcagcagtgaacagaggtgtgggtgtggaaggttttcagaaggcgtttagcatgaaggatgtcatacatgctgttgccagcacttggccaacagtgactaagacacagtcatgcctgcttggcataacctctggcctgtgactattcagtgatgatgatgatgatgaacaaggtagtgacttggatggattccatatgttaaagtgagaaaaaaatgatatctgacctccttttatatgcaaaaaatacatctttagagtctgtcagtaaacggaaagaaggggatattaaagaagtttttattatcaaattaatgaagcttcagtttttcatttattgactaatgatgaaatagctgaaatggttctgaatcaaggtaaatgtgatatttagtgataatgaggatgatgttaacaacgaggaagaaatgcccatagacaaagtgcacattctgcatatcaaaagaaactatcaacagagtaaacagataatctgcagaatgggagaaaatatttacaaataactatgtgtctcacaaagttctaatattcagcatctataaggaacttaaatttataagaaagaaaacaacctcattaaaaagtgggtaaggacgtgaacagacacttttcaaaagaagacatgcatgcatccaacaagcatatgaaaaacacaatgtcactgattattggagaaatgcaaatcaaaaccacaatgagatacatctcacaccagtcagaatggctgttaaaaaatgtcaaaacaacagatgctggtgaggttatggagaaaagggaatacttatatactgttggtggaaatgtaaattaattcaaccattgtggaaagcagtgtggtgattcctcaaaaagctaaaaacagaattgtcattcaacccagcagttccattactggaaatgggtatataccaaaaggaatagaagtcattctgtcataaagacacatacacacatatgttcattgcagcactattcacaatagcaaagacatgtaatcaacctaaatgtccatcagtggaagactggataaagaaaatgtggtacatatacactgtggaatactctacagccataaaaaagaatgagagcatgtcctttgtgggaacatggatggagctgtaggccatccattaatatctaaggatacttacttagcaaactaatgcaggaacagaaaatcaaataccacatgttctcttaagtgggagctaaatgatgagaacacatggacacaaagagcaacaaaacagacactggggcctacttgagtgtgggaggtgggagaggatcagaaaaaataactattgggtactaggcttagtaactgggtgaccaaatggtctgtacaacagacctctgtggcatgagtttacctatataacaaacctgcatgtgtaatcctgggcctaaagtaaaagtttaaaaaaaataaaaattaggccgggcgcggtggcacatgcctgtaatcccagcactttgggaggccaaggtaggcggatcacttgaagccaggaattcaagaccagcctggccaacatgtgaaaccccatcactactaaaaatacaaaaattagccaggcacagtggcacatgcctgtaatcccagctagtcaggaggctgaggcatgagaattgcttgaacccaggaggcagaagttgcagtgagctgaggttgtgccactacacttcagcctgggcaacagagcaagattctgtctcaaaaaacatatatataaataaaaaggaaaaaaactaaaaaaagttttaaagaaaatggaaacaagctccctcattcccccccccataaaaaagaaaaaatgctcttgatgaaaatgtgtaatggactcattaaaggattagagcagtatgcattcataacacaagaagaaatcatgtcagtttataaaactgaagagagactcctaagacaaaaaccattgttaatgaggcagttgactagggaggaaacattttacaaagccatctagcagaatgcctcctcattactagaggacccacttctggcccctcaaatgcttctgatgtttcttctcacctaaaaaaataaaatacagtgtacaatagccttttaatcaaaacacagcatcgtagttggaggttgaaagcttgtagctgtttgttgtagctgctgtttaacagttgatgcaggtattctggcgatgctactgtgctgcttagttccccagaactcattgtttttcactgtattgatacgtcatattttttactgttaagtatttgtgtgaacaagtgtaagacaatgattgcctattaatagcatgtaaattccgagtccggaatgatggtgatgcccagcaaccacagattgtctacctgggtggctgagatagtgacacttttgctttttggtgcttcagtgtacacaaactttgtttcatgcacaaatttatttaaaatataatataaaattaccttcaggctatgtatatagttgtatatgaaacataaataaatttcacgtttagacttgggtcccatccccaagatatattattatgtatatgcaaatattccaaaatttgaaaaaatccaaaatcgaaacactcaggttccaagctttttggatgaggaatactcaatctgtattatctaatacatagttcatactcagatttcccatatgtcaaaaaaactatcttttagctgtcaatccagggtcacattaagattccataccagctactcaggaggctgaggcaggagaatggcgggaacccgggaggcggagcttgcagtgagccgagatcgcgccactgcactccagcctgggtgacagagcgagactccgtctcaaaaaaaaaaaaaaaaaaaagattccacattgattttaattgttacattattttaatatatacagggcttgatcattctttttgttttctgtgacattggcggttttggaagtgttttcagaaggtctcgcattcttataatatctgattgttccctcatgattagattcagactacaactatttttagacatgcatacttcatgtatgaggagtgttttttattgcataacattgcaaagcacataatggttactatttgtaatgtttacagacatgccttttttttaagcagttaaaacagttgcagaatagaaagtggtatgtttctttattcatttaggtcttcttgccatctctcagcaatgttttgtagttttcagtgtgcagcttttgaagaccttttaaatttatttctaaggagttcatggtttttcgatactgtgaaaggaaaataaaaacttgggaccccaatttactatgccaaaacaaaaaattcagctgaaagctgagtgatgtaaataaaaaactgcctttccttttgttcttaagcagatagctacagataaagttttaaatatctccacaggtagctattccgttcaccttatcttatttaagtgctaacttactgaggatgagaggaatacataatcaactattccgtacttgctccttttctcttgcaacatacggattcagtaatgtgaccacaccctccctcgtccccctgctgcctgcttttcctctttaattattgaagccctcaaaatcatatttggagaaaggcacaaacttccctttcaggcatgtccttaaccgtggcaagataaacttctaaattgattgagacctgtctcggatttctttttgtcttagaatactgttattgggagtggaattaaaaatattttccaatattttgctattattatatagaaatacaactgctttgcatgtgttaacattggatcttgtgaccttgctagtttagttttactgttagtttcagtaggaattttctgtgtctgtgaataaaggtaatgcttgttttcccccttgcctttctatactggctgggtcctccagtagaatcctgaatagtaataataatagtaggcatatttgccttatgcccaatattaattaaaaagaaagtgttctatatttcaccagtaagtataatgttaactcttggttattttagatgccctttatggaaatgaagatgttttcttctcttagtgtgttgttatttctgttgttattagtgggttttacattttgtcagatgctaattctacatttattgagatgatcacattattttcttcctttctataaataatggtgcattgcattgattttcaagtattaagttagtattgtattcttgagataaactctacttggtcatgatacattacctctttgtatgttgctggattaggtttgctcatattttgttatttttgtgtctttctgtgcaagggctattaattgtcttgtaatgactttgtcaggttttcaaaaatcgttatgctggcctcatgaaatgagttgggaagcgtaccatctctcacttttttgaaaaaaaaatttgtgtaaggccagtgttatttctcacgtatttgaaaagagttcaccagtgagcccatctgggtgtggacttttctttctgggcaggtttttaataacattcattaagtaacatagtttaaaggttattcacactttgatattctttttggtaggttttcattttcagaaaatatttctgtttcatctatttctgtaagaacagtagtaatggcccctctttcattctgattttagtaatttgtatcttttctttttctgtgggtcagtctagccaaaggtgtgtccattttattgatcttttcaaagtactgttggttttcttgacttttctctattgtttttctattcctgttttacttgtcttcacgttactttttcttacgttcttcctcctgcttgctttgtatttcatttgttcttttttttctaattctttaagctataaagtaggtttgatttgagatgtcttctcttctaatgtatgcattttacactatacattttcttctgagcactacttctatatcccacaaattttgggaagttgtaatttcattttcatttagttcaattttttaactatttcttgagacttttttgatccatttgtcatttagaggtgtgttgttaaatcttcagatatttgaggactttgcagatatcttcctgttactgatttctaatttatttattttgtgatctgagaacatgctttgcatgctttccatcttttaaaacaaggtgtgttttatgccccagaatgtggtcaggattaatcaatgttccatgctagtttggggaaaatgttgatcttgatgatgttggatggagtattttttctcttggttgaatatctgggattttaatgtgtaccttatcaggcaaatacttatatttacaacaaaaaaaaacaaagtaaatagcttacagtgaattttatgcagcacagtactcatgctcaaagcaatatacagatgtctttagttgatgctcacaggcagagaatgtaatacagtcaactattatgcttctctgggcatttctttcaacagcagttactctcagacttagcgaaggatccattgtcaactctgtgccaacaggaccctctctctctcttcccttttcctgacacatcatttagatggtccctaatttcaaggaaatgtaaagatgttctttcacagaaattactaaaaatgatttctgcggtacataggataatatattactgtcttggcagtgctttaatttggctacaaatgactaacagacaaatatctttacacatatgtgtagtgataaatttagcgttattgtgaagtatgggtggaataattgtgataaatttagctcttgttttgcttttgtgtctcaaatatattgtggtatggcctcatccaccgagcaaagtcttttaaaaatcgaagacagtcttttttgtttgtttgtcactcgttgccccaaatttgacctaattctttttttaaaacctttttattttttaattttttttttgagatggagcctcgctctgttgtccaggctggagtgcagtggcatgatctcggctcactgcaagctctgcctcccgggttcacgccattctcctgcctcagcctcctgagtagctgggactacaggcacctgccaccaggcccagctacttttttgtatttttagtagagatggggtttcaccgtgttagccaggatggtctcgatctgctgacctcctgatccacccgcttcggcctcccaaagtgctgggattacgggcgtgcgccactgcacctggcgaccttgtaattctttatgttttccagttttcttcctttgtctccctcttccctcagcttcagctttgtaaatgcttttgagtctttgaggggaatagttaaatgaattgcttagtgttctctttatggaagtagccattaagttttttgttgtttgtttttatgataatgatgacttcctattacttccattctgacgctagacatggattcctctaggaatatactggcattttggctgtctacccagctgttgcttccatttgcctattccttgagtgtaaggcaattaataacttacacttgtctttatgttccagcctgaaagaatagacccaagcgcatcacgacaaggatatgatgtccgctctgatgtctggagtttggggatcacattggtatgtttatgctgattcaaccttgccacagtagcgtaacaataagaaatttagaagtgaaagaaaacttaatcagacttccccgttcgttaagaactataatcacagacactatggttttaagttgctgaaaaaaaaaaagtatgtatttatttactttaaaaatcaaatcagacttgattatttcccttgaagttatgtgaagtgtctagagccctttaatgttttaactggatctcttggccacagataataggagtcaactattatctgcaactgcactaagaatgggaacaggacaagccagcttacctgcagtcaattcattgatgaaggcacataggcttctcccatctcaggcaaggtgtagtatgtccagtaatactgtatatagtgtgtatattaagtatacgtatttttatatgtggaaaatagtttctacttgcaatattctattcactgaatagtaaaatcacaagtgaatgagctgaaagtaattcagtttttgagggacaatatattagtccattctcacactactgtaaagaactacatgagactgggtaatttatgaagagaggtttaattgcctcacagctccacaggtcgtacaggagcaggggagagagagagtgaaggggaaggtgccagacacttttaaacaaccaggtctcatgagaactctatcatgagacagcactagggggatggtgcattagaaaccaccctcatgatccaatcacctcccaccaggccgctccttcaacacatagggattataattcgaaatgaaatttgggtggggacacagagccaaaccatatcagacaagaactacctaggtgataattctaaatgaaagttctaccttagaacaacactgagaaagaataataagaaagctacttaatttgcaacaagcaagcgcaattatataaactcttctttcttacctatggactgtattgaaattttggtttcatttaaaatatctgtattagttcaggctgctccaaccaaatgctgacctctgggctataatcttatcaagaacagaaatttctcacagtttcggaggctgggaagtccaagatcaaggcactgacagatttggtggctagtgagggcttgcttcctggttcataaacagccatcttcttgttgtagtctcacatggcagaagaggcaagagagctgtctggggtctttcttacaagggcactaattagattaatgagggttccaccctcgtgaccccatcacttcccaaagatccaccaccaaataccatcacattagggattaggcttcaacatatggatttgctggggggtggggacacacaaacattcagtctctagcagtatctttgctcatttcctttttaccaaattttgttttgaagtcttcggtttattttcttgtgcttgctgttctaccaggacttgctgggtttttctgatttgggatagcttctttagctgcttctacattgaaggcgaattttctatccctagatgaggctgtcctgtaggtaggcaggccaatcctcttctttcattttctcccattttcagtttttgctacctaagactctatagcccagaaatacacaggttcagagcaatgggctttttttgtagcttattaaataatcttcatttgttcattggtattacatgtttctaggatcttctctgtgatcagaagcacataaccttgttagttattcttgatgaatcatattgctaggcctagagaattcttcgtatagagagttgaaggccaacagctcacctctgcagaggactttgatttactttactttgtgaccaaatataggaaataccttctggaatcttttctcattgtgaagccaaccagctaaagaagagattcttctttagacaggagagaacatggatctcgggcatcttttaggtttggcaactggtcccaaagactgcagcaagacctagagcttccagctgaggcaactatttgcatacacaggatatttacaattcagaaatacttatctatgactaaacaattacgttttaaaagcaagtatgtacttctttacagaaagaaaattttgtgaaaggttttaacagaaaattttttagcaagtttcttttagtacttttagctaaaccttgttgtttaaaaggtattctgtacttacagttggttcataatttatttttcatagggacagtcttataaaaattgtgaaatgtatgaaattaatttctaagatcctaagtcctttattttatgacatacagccaacttttccttctattattaaaacacaagaaggaatctaatgaagttattcctaattctgtgaataaccaggaaggtttatgtcttgaaaagcatttataattttaacagaaagaaacttcagctaacggaatacatttttctgtgtgtgtatgcatgcatgcctgcttacttttgtgcacacatgtgtgtaattagaaacaacagtgagctgacagaggcatcctttagggaggaaacggaatcagtgttctgagagttctctctctcttcctgtatgccatcttcctctgtaatatgtttggagcctcatcctcatgtatcagtcacctgtcagtgcatgtaaaatgggattcattatgccatggtgcagatttaaatatgtttcttggaaaaagcaaaatttgtaggttttcttttcttttgttttttgagatggagtctctctctgtcccccaggctggagtgcagtggcgcaatctcggctcactgcaaactccgcctcctgggttcatgccattcccctgcctcagcctcctgaatagctgggactacaggcgcctgccaccacgcccggctaattttttgtatttttagtagagatggggtttcaccgtgttagacaggatggtgtccatctcctgacctcctgatccacccgcctcggcatcccaaagtggtgggattacaggcgtgagccactgtgcccggcctaattggtaggttttcattatttttcagaacagaaagggagatagatgagaatacgattcactggttattagagaatattttttttttggacccttgataggattgggacatacgtaagactcttcagatctcttctggtgtggcttagaggtactgtcctgagccctttattggggcttcaggatgcagggtttgaccctgacttgatttcttcactacttgtaaaatctggttgtggttgaaattgtagtatctgcagaatagctgtagagcaggatttgcacattgtttcctccaagctcagattaggcttttgtttgttggatgttcttttgccttaaaaaggagtctaaccacgattatggaccaaggccttcctctaagatggctacaaattgtgcgtattctatagtaaaatagttctaaaaccagtcttccagactttcttataaagaagtcagaaccacaggctgccctggagcatgcattgtagggacattgtctaggcttaagttttgtgttcccatgtattccaagtccttgaatttggttgattcagaattctctatattattttgatttctaaatataacttctacttagcctttatgattctgaagattcctccccaagctaacctgtgtttaattcaaggctttactagagttttgcttgtagtttagatttttttgtggcccttccagtggggagtagtaaatgatgcctggtgtattttgctctttcctctttgttctctttagtatgagttggccacaggccgatttccttatccaaagtggaatagtgtatttgatcaactaacacaagtcgtgaaaggagatcctccgcagctgagtaattctgaggaaagggaattctccccgagtttcatcaactttgtcaacttgtggtgagtacctgatttatgaatggtcgaacacgcatggcgagaatagtgagatttacttggtcttagcagcattggtactttacatggaggaaggggacccttggtcacatcaccctacttttcaagctgggactctggatcactgtggctgtatggaaggttacagctagctgggagaggcatcaccttcttattctgctactcaggtattggtgaaaaacagccatgagtggtggagaggctgctgtctccagacttccagtacctggtacaagaaataccaggttaaacttctaggtgagactgatcatcttactctaatgtggttctcacaatgcaattgcaccaaaatcacctggaagcatttactgaatcaagagcttgccagatcagactttcagggttggatctctgttctgacataacatagaaaacagttggttatatgtagtagggtcacatccacacgcaaagtgtagttggtagaactgtatatctttgctctctgaaaccttactccaaggaagatgtgaaccccacacctgttgttgtttgtctacctttttaatagtttgttgtgtgtttgtgtatatgtagcacctaagaataaacatatgcagatatggcagtaatataatcatgctttatactgttttaggctcttttaaataaaatctttttgtgttatcatttggatatttttgacatttattttgtttatccaacatgatttaaatataagacatgctatgaacaaaaagcctcagagcattttgtgtatcttctgtttattcctgaaaataccttttggtttctcataattttttcctgctaagaatgcggtttctcctcattttaggtcttatagacttaaatcagggtctaacattgccctcctttgtatgaaaaatttaaaaatatttgtttgactatagtttttaagtctctttcatcttctgtaaccaaattctacttttgtgttggtttttcagaggggagaggaatacttcaagattttctaggtagaagaaggacataaggatgactcaaattggctgcttcctccttttaaaaaacaatcaattctgtactaatttgcacacagtatggatagtttatataattgcataaatgtgatcattttatgtatttcatttttatgacatatttgcttaaaatgatctgtgtaagtcatagggtataatatctaaaatgatcacctgtgaaccttccatcagggtttctttttaactccttgatctctttattggttttgttctgtatgtgttggtacttgtacatgtttatttctgtttcccttgatgccataatagagtgacagttttagacattggagtcccattgttttccctgagtaggttcatagttccatgtcattgcaaatcattaaggtctacattgaagtgtacttatgttcataatatgctcatattagctctccacatttgtccattctttctgccactctttgtcttggacattgcctgtaatctctaacctggatcattcagatttctcataatccaatattgattttcttataatccaatattgtcttgttccaaattattcccctttttattagagttgtattttttatgatgtatatctgatcatgttacttctctatctaaagtatgcattcttagcagggtgatattgaccctaaggaggcaaaaattgattttggagaaatgaaaatcttaggttgtataatggtttttagtcctccaaagggccatagaatataaacagatatgcactatatctatcatatttaaatttcatgatggggaggataaataatgaaaaaaatactgagagatactattctatagagacttcctcttgtccttaaaattaattaatttaggctttcagaacccattacgatctggacttagtttattgctctggtcacatttctttttttttttttttttctttcttgtttttttggagatggagtctcagttgcccaggctggagtgtaatgatgtggtcgcagctcactgcaacctccacctcccgggttcaaacgattcttctgcctcagcctcctgagtactgctgggattacaggcacctgccaccacacccagctaattttttttttttaagtagagacagttttcaccatgttggccaggctgatctcgaacttctgacctcgtgatctgcccgcctcgacctcccagagcgctgggattacaggcatgagccactgcccccggcccgctctagccacatttctcatgacttccctctccttgaatggtttctgccaaactgaatttcttcagttacataaattaaaagcacatacaggataatatgggagaatgttttcattacgtttgggtaaagatttctgaaacagaacgtagaaagtagccaaacctaagagaaagattgattaaaaaaaaatggatttcattaaaattaagaacttccattgattaaaagacagcactgaatgacatgccaagccacacagtagaaggagatatttttcatacttatattcgacgaaggacttttacacagaatatgtaaagaatacttaaaaatgtaaaacacttatgaaaaataacaaccaaaaatagcaaaatacttgaaaggcactttaaagatgatattcaagaggccagtaaacatattcaatttactgcattcattctgcattattagtaatcaggagacatgcaggtcagaactacagtgaaataccactataattaccagaatgaccacagtttaaaatactgacagtaccaaatattggtgaggatctgaagcaactggaagtctcatacataacttgtaggagtataaattagtacagttcctttgaaaaacaagcagtatccagtatagctgatctaatatggttgatgtatacaccatggttcagcaattcaagttctgactatatacccaacaaaagtgtggacataaatacactaaaagacatatgtaagaatgtccggaaaagcacatttataacctacaattagaaactctctccacagtagaacagataataaattgtagcattatgtatacagcagtatatagcatcagagaagatagaaccattgcttcactcagcaacttcagtaaatctcacgaatgatgttgagtgaaagaagacagaaagcagtatgtatggttctatttctatatgaaagttaaaagcaaacaatataaggtattggaagtcagaatattgttactttttagttctgcacttaggagttgtgttttctgtatgtctgcttcgattaaaagttttcctaaggaaaaaaaaaaaaggataagacttaatggttcaaaaggaagaccttgccgactgaggtgtctgagcgctcagcattgggaaatggtcgactcgtgggttgataaaaagaatttacagacaacagtataggtttgaaaaaggaaagtttattagaaagaaagtatgctgcagaagagtgcagaagggtgctgagcgtgccacagtggatttttccttaggggtatttatggaccttaaagcttgaggataatttggaccatattagccatgtaggtaacaataaatgattacatttgtagtaattttggttccttaatgtcagcaagtgttgcacagtgaatttcgacatggcattctggagatgtatagaaattctagttacttacaaagtttttttggggaaaaaatctggaaccaatgcctgctttagataatagggaagtctgattacttcttgggttttgttgttgttgttgttgttgttgtttttaatatggagccttgctctgtcgcccaggctggagtgtagtggcgcgatctcagctcactgcaacctctgcctcacaggttcaagcgattctcctgcctcagcctcctaagtagctgggactacaggctcatgccaccatgcctggctaatttatgtatgtttaatagagatggggtttcaccacactggccaggctggtcttgaactgctgacctcaagtaatccgcccgcttcagcctcccagagtgctgggattacaggcgtgagccactgcgccaggctgggaagtttaattacttctgattttccccagataaggaattttgcttctagattgcctgttggatagtcatcgggtggtttttgctccttctgcattcctcagataaggaatttttgtctctagggcctgttcagtggtcaccaagtgattttgctctcctcagatctcagcccatattttaaactgtttcccaatttaactatctattgaaatcaccattggaattttttttaggggaaaaattctttatttgtcctgggggaagaaaaaacaaaaaatgttattcttgaggaatttttgtgaaactctggatggggataagactgaattcagggatggattgcctaatccaaaatttatcgtgtgcagaggggaatataaaaagtcactaggacgatataagacccatatacaactctgtagcttgggcagcagacctggaagaagaggcaacttgtgggactgcctaattgtgcaactaattaggcagtaaagctcgatcctgaaatgtcttgaggaaatgccttctgtgctagatctcacaggcagctgggacagtgtagtagtatctactcctgcctttctcttagcagcaagacctgtaaagaaaagctcaagctttgctgaaataacttctaacaacaacgcctgtgttggttagagggcgggagcacagtgcatgctgttagagcaaatgcaaaaattaaatccctatagtaggtgatgatgctgcagtgatggctctccacctaggtgatgatactgcaatgatggctctccacctaggtgatgatactgcaatgatggctctccacctgtttctcacagttaacctgaatccatagctgagattaactgtgataaagaaaaatcactaacagatgaaaactttcagtgattcggagaattgtacctaagaaatctaaacaaatatttcctttaaaatgtcacagaaaaaaaaacaaggtaaaaaattgtaaggagggaataatttgaattccagaaacgttatcttcagatagtaaacatgattcctgaactgaatgggggaaaatggtggcacacagcagattgagtattgcaggttaaccagatctgtaagtaacaccgtttagttaatctttaagaataaagggctaaaaagatgaacatgaggtaaatggtaagagagaagaaaaatccaaaatattctatttagctgattgtagacaaagaattaaaattaaaattccttctacttgaagaataactcaagttcttagattaaaataccagaccaaattaaacaagagagtagagggaagccacatctagatgtgttctgagaaaagataagacttgacaagttttcaattaaaacacatgcacacaaatgtacacaaaacaccaagtcagcaatacctgaagagcagagaaacagctataacaggaggaatgtggttacttcacattactttggtgcattagatatcttggacaacacttgcactgaaactactaaaatgctggataagctttttattttatttattttgagatagggtctcactcactctgtcacccagactggagtgcagtggcatgattgcagcttactgcaacctcaacttcccaggctcaagcgatcctcccatctcagccccccgagtagctgggactacaggaatgtgccactacacctggctaatttttgtttttttgttgttttttgcttttttgttttgagacggacttttgctcttgttgcccaggctggagtgcaatggcatgatctcggctcaccgcagcctcaacctcccggtttcaagtgattctcctgcctcagcctccagagtagctggattacaggcatgcaccaccacacctggctaattttgtatttttagtagagttggggtttctccatgttggtcaggttggtcagctcttgacctcaggtgatccgcctgcctcggcctcccaaagtgttgggattacaggcgcgagccactgcgcctggcccacctggctaatttcttaaaaaaatttttgtagagactggatttcactgtattaccctggttggtcttaaactcctaggcttaagcgatcctcctgcctcggcttcccggagtattgggattacagtggcgtgagccactgtacctggcctggataagcattttaaagtgccatttatttatttaggacagagtctggctctgtcgcacaggctggagtgcagtggcatgatcttggctcactgcagcctccacctcccaggttcaagtgattctcctgtctcagcctcctgagtagctgggactacaggcacgcaccaccactcccagctaatttttgtatttttagtacagacagggttttgccacgttggccaggctagtctcgaactcctgacctcaggtgatccgcctgcctcagcctcccaaagttctggcattacaggggtgaaccatcgtgccccacctaaagtccctcttaaaatgtaaaagagttggtgcaaaactgaggaatccatggagctctgaagttgactgaaattcagggagggagattatgggagagaaggaagagtcaaagtaaattaaaggataacccaagcaaatgtagatttgccatctaaattcatattgaatatggtaaaaatacttagagaatttaattttaagaaaaattacttttcagagtccctggttggaaagatatgctcctcttgcccccagttgatgggcagaagcaaaagcaaatcattcagcctaggactaaatgattccaaaaaataaagtcaagtggaatatgtagtccacaaaaaaatctcaacactcacaaaagaaatgagaatcagaaacaatggatagtaggaatagatctgcaaaggcttcaaatattggaatgaaaggaaacaaaaaataagtttaaagaaaaagaggcagcttagaaatataagcagggaacacatttataaagaaccaaatagaacttctagaaataaaaagcataaattaaaacaatagctgcattcaacagattagatatcattgaagagagattaatgaactagaagacagagctgaagctctcccaataaaactttttgagatgctggaaatgtcctataatctgctctgtctagtgtggtagctgctggcatttgaaatgtggctaatgtaactaaggaaatgcattttttattggaattaagtttgctaacggctaccttattagatagtctaaggggagctaatataattattgataacattattagtgtcagctgtaattcagaaaaagaagacagtcaatgttaatagtttaagatttcaacccaaatagcatcataagtttatacactgacataattttctgctccagtagatgaaatagaaaaacacaaaaccagaaaggtatggcagctttacaaagaaagcaaacctctgtgtgggtgaaaaaatgcaacaaaaatactgacagaatgctgtgtagatctgatgccatggacttgctgtattccaggtcatttttcattctggagaatgaaaaaaatgatatcagttacttcctgggccacagctttaagcaagctatggtactacacaatgacaaggctttagatactggttttgcaaccagaggactggaactgtaattgtcctaataccaacataggagtggaacttgaaaggtccattacaggaccctgtttgatactggtggccctgtgaaatagaggcaactgtaaaactgctctatgtgtgtatccctggctcccagttcagttcatagtgattagtggggcactcagacatatgttgaacaaatgaatggatatgcatggagggtaaacatgttatttcaaaatgagtctgcaaatcataattcttgaatactgaagtgtaatgctaagaaagcatttaacaaaatggaacagaaacttactttaagttgaaatagatttatgaaattgtctgaaatatgctgtaaaagaaaatcagtatatttaggatgctcaaggaaataaaggtataaattcaattaaaactgaggaagaaataaagtggttggaaatagaagtcttggaaatggaaaaatcatagctgttgatataaaagacacaacagacttgatgttctctagactggaaataattgaagacaaaattagggaaataggagctgagacgttcccccagcatggcacagattatatgaaaagcagtgaagaatcagaacagattgcagagttagaggttctaagatgcatgtaatggaaataaagaaggcaactctgaaagtggagaagcaatgtttacagagatcataggggaaagaaaacatttgagaactgatttagtataggttttcagattgaaagtgaagtctctttatcatgtaggataaacaaaggtataagcttaaaggtaaatttaaatataaatttaaaagtaaattttaattgatattctgtagttttgcttcagtgcataaatgataaacaaaggtataaatttaccttttaaatttatatttaaatttacctttaaatttatacctttgtttatcatcatttatgtattgaagcaaaattaccgagcaatatcaggaagagaaaacagattatctgttaaggattgataataagactaacagcagatttgttcccagccacaatagttgcaggaaaaagtggagtcacagcaccagagtgctgagggaaaataattgtcagcctggtcctaaagttttagactcagacactcaaatattcacagtaaggaagaaatacagttttaggaatgggaagactgagcacttacaatttatagactgctttgatccttgaatggtgtggaggttagggatgctgaccccctgtacagtcaaaaatccgcatataacttttgattaccccaaaacttgactactaacaaatagcctactgtcaaccagaagccttactgataacatagttaacatatattttgtatatgtattatatactgtattattacaatgaagtaagctagagaaaagaaaatgttattaagaaaatcataaggaagagaaaatatattatttatgaagtggaagtggatcatcataaagatcttcatccttgtcttcacattgaatagactgaggaagaggaggagttggtcttgctatctcgggtggcagaggcagaagaaaaatccatgtataagtggatttgtacagttgaaatctgtgttgctcaagggccatctgtacttgaccaagaagagaagttaacccagaagaaggatgtcacaggttggatgcctggaaagcaggcttttgagacagagataagagtgtaggaagttgactaggtagtgatcttgggatcaacactaccaatgagaaggaaacgagattgggcagaagaagttcagttgcagtgccatgtcattgaaggcctcagccaactctgtgttgacctgccttggaatgagggtcttggatttttattcacttttgtggatcagtcattagagatggactgtcccaggagggctaaggtggctgtctttagctgtggtaatcctgaagaggccgatagtaaagggttgtctgctggcggcttgccccacagtggaagaataagtccttccttcttaaagagggaatctacatagcacattgcagtatctgttacagaaggtgtgggatatggaaaacagcaatgagtttagaaagaggtgaactatgttacccatattaattcatgtttgatagtaaaatattaattgaggttggaagggaatggtgattaagatatgggccaagatagatgaggtaaatataaacaaaatgaaaatacttttggcagctttaattaggcaaggtagaattcaaggagaaaatgtcaacagagcagacatttttatatactgatgtagtcttcagtgaagttatattgttttaaacttttggaccaaagaacatattgagatacagagtataaacttttttaaaacttaaggataaattgataaaaatgtatatgtaatttatctcccagaattacttgattgctggtttctcttgggtagtatctgcataaatatctgtctacttatttatttacatttagaaaagcatatatgtacacaaataattttatacttataaaacatttatatatttaactgtagtattctgtgtagctatgccataatttagtcaattttcaagaattaatattttttctaatttttaactaatcatcctacactgactatcctagagataaatcttcagattatagactcacaattttttgtatgtgcttttactgtgtttagcaggctgtctgcgttgttactttggatctgaaggaaagaactatttcattatttgtaatatttcatctgtgaaaagaaaaatacttaggcaaatgaatctacattttaataatgttatttttatgttattttagccttacgaaggatgaatccaaaaggccaaagtataaagagcttctggtgagtgtgggactgtggggattgtaggtacatcctaaccccggaactctcttaacatgctggttcactaagcaagcagtgggcctctctgtcataaacaaacatctcaaatttattgagtgttttttgttaatgtttttacacaaagatttggaaagagaaaatttgcagttataatttttctactaatactagctaaattctcatggaaaattttggtcttaacatgttataaaaattacccccaaagaattctgactttaagaagccattttccactgcatagtctatttatatgggatgcagccataagaaaaaaattagtgaaaatttgtgtttattctgcctttataaaattcatgcaaatttacgtcatatagcctattcccatttctttgaaagttctcattcatcccatggaacttgggtgttttaagcagtctactgggtatggcattggtggggcagggagaaagtgttgtgatctaataatgtgggaatattttaagaaaagatccatttgtttgtcacatttaactactagctcttcaaggatgttgtgacaaacttatatcacagtccaccaatgactgtaaaaatatctagtcaacatacttagtctgtaaaagaaaactgttgctagagatggagttttaaaaggtgggttagtgaagcagatactgggaccctggctctggagagtacagggaagaagctcctggggcaaatttctcttgggcctcttttggtcaaaagaattacagcctttttgttaaaaggtcaaaagaagaggtcaaaaggattgcgacctttttgtaaaaaggtcctcctgttgtatataggagaaatggaggttgagatttatattggtgtcccaagaggaatagtgactggcatttgcgtcattcttcttagctcttagatggtgtggtggaggctccagctatgttttgtgctgagtgacaacttggctgtcttcctcaacaaacactccctggtatacagatgagtttccagacctcactgccaaggtggcaccttcagatcattaccacgtatcctctctctaggcatgcccatgcccattagcatatctgcatggaataaaggctgtactcgcctctctgaacttgtagtgttgcggtatttcatagctatgtgtggttgggagcctggagttctatgttctatagaaattggaaaatgttcagtttgggctgtcatacaaacttttgacttttttgttttcaattttcttgcagaaacatccctttattttgatgtatgaagaacgtgccgttgaggtcgcatgctatgtttgtaaaatcctggatcaaatgccagctactcccagctctcccatgtatgtcgattgatatcgctgctacatcagactctagaaaaaagggctgagaggaagcaagacgtaaagaattttcatcccgtatcacagtgtttttattgctcgcccagacaccatgtgcaataagattggtgttcgtttccatcatgtctgtatactcctgtcacctagaacgtgcatccttgtaatacctgattgatcacacagtgttagtgctggtcagagagacctcatcctgctcttttgtgatgaacatattcatgaaatgtggaagtcagtacgatcaagttgttgactgtgattagatcacatcttaaattcatttctagactcaaaacctggagatgcagctactggaatggtgttttgtcagacttccaaatcctggaaggacacagtgatgaatgtactatgtctgaacatagaaactcgggcttgagtgagaagagcttgcacagccaacgagacacattgccttctggagctgggagacaaaggaggaatttactttcttcaccaagtgcaatagattactgatgtgatattctgttgctttacagttacagttgatgtttggggatcgatgtgctcagccaaatttcctgtttgaaatatcatgttaaattagaatgaatttatctttaccaaaaaccatgttgcgttcaaagaggtgaacattaaaatatagagacaggacagaatgtgttcttttctcctttaccagtcctatttttcaatgggaagactcaggagtctgccacttgtcaaagaaggtgctgatcctaagaatttttcattctcagaattcggtgtgctgccaacttgatgttccacctgccacaaaccaccaggactgaaagaagaaaacagtacagaaggcaaagtttacagatgtttttaattctagtattttatctggaacaacttgtagcagctatatatttccccttggtcccaagcctgatactttagccatcataactcactaacagggagaagtagctagtagcaatgtgccttgattgattagataaagatttctagtaggcagcaaaagaccaaatctcagttgtttgcttcttgccatcactggtccaggtcttcagtttccgaatctctttcccttcccctgtggtctattgtcgctatgtgacttgcgcttaatccaatattttgccttttttctatatcaaaaaacctttacagttagcagggatgttccttaccaaggatttttagccccaaatctctcatattcgctagtgtttaaaaggctaagaatagtggggcccagccgatgtggtaggtgataaagaggcatcttttctagagacacattggaccagatgaggatccgaaacggcagcctttacgttcatcacctgctagaacctctcgtagtccatcaccatttcttggcattggaattctactggaaaaaaatacaaaaagcaaaacaaaaccctcagcactgttacaagaggccatttaagtatcttgtgcttcttcacttacccattagccaggttctcattaggttttgcttgggcctccctggcactgaaccttaggctttgtatgacagtgaagcagcactgtgagtggttcaagcacactggaatataaaacagtcatggcctgagatgcaggtgatgccattacagaaccaaatcgtggcacgtattgctgtgtctcctctcagagtgacagtcataaatactgtcaaacaataaagggagaatggtgctgtttaaagtcacatccctgtaaattgcagaattcaaaagtgattatctctttgatctacttgcctcatttccctatcttctcccccacggtatcctaaactttagacttcccactgttctgaaaggagacattgctctatgtctgccttcgaccacagcaagccatcatcctccattgctcccggggactcaagaggaatctgtttctctgctgtcaacttcccatctggctcagcatagggtcactttgccattatgcaaatggagataaaagcaattctgactgtccaggagctaatctgaccgttctattgtgtggatgaccacataagaaggcaattttagtgtattaatcatagattattataaactataaacttaagggcaaggagtttattacaatgtatctttattaaaacaaaagggtgtatagtgttcacaaactgtgaaaatagtgtaagaactgtacattgtgagctctggttatttttctcttgtaccatagaaaaatgtataaaaattatcaaaaagctaatgtgcagggatattgccttatttgtctgtaaaaaatggagctcagtaacataactgcttcttggagctttggaatattttatcctgtattcttgtttgaattcctcctctatttaagatatatacatggaatcgaagtgtttatgtaatagttctatccttttgcctgcaggtcagttgtaataaatctaggatgtgatgatgactttgtaatttgattttctgaaatcagaccctgagaggggaaaatcttaaagtaaattacattaaattatctgtgcatttcacaccagggaaaatgacctccttttggaagtgttttatggctgctttctttttcttcttccttcccatggctaccctttttgcttatccttcttgaaaccacagatgtatctgttaagcatagctttgcttgaacaggtgtcacagtctcttgagtttctttgtttgttgtcctgacctgccccagcattcttaatgctaaaggaagtgggtacagttcttcaacctgtgtcatggtggagaggtacaacttataagtctatctgggccccgtgtatggtttccagccatgctctccgctcttggtgcttcagctgccaggtgagcattagatgtcaggttagatactgggttggaatcactcactgttaccttagaagggtagggaggattgtgggtagaagacgtctggaggtcagacatgggaggtttatggatgagaggacaatggaagtgaacaaaaagccatgggagcctgaaaactgttggagaaaagcactttgcggctccagcactgaatgtatctgctgtactctacctcctaccagtgattgatcagataacagattcattgatattatggtgattcagcaccttgcccttgtgcctgctcctaactgtacctgagatactattacacagccagatgtggtatcaaacattcccctgagaggggtgtgaaagcaggaattctggcctctccagctaacctcagctgctaagggaaagggtacccattgggtttcaatactggcatgagagatagactacacactccatgtttcataggacactgccttgtatttgttcatctcatttgattccaaatgcatcccactaaaatcaagtggctgtatccccttttagatacaagaaaaccaaggtccgaaggagtgaagttctggctcaaataacagtagggagcagagctgagattcaaattcaaggccgtaacacgtaccctaagaagttacattaatttaaaaacactgctattaaagaagtgttgtggagttgagaagtggaagaatgaatatagttgaggatactctgttcataaacctgaccagggcctgctttgttgttttggaaatgagttgaaggcagaggttctgggggccacagtggggcttaacatacaaagcgatccatacaaaggcaactgtgtaattaccttagaattaactagaggaactctaggttgtaattcttcagtgcaaacacctgagaattcagtgtcatggactgaacgtctccattagcatgataatgtggcaatcactgagaatgagtaaagtgccctttcatttattttatttattttttattttttgagacagttttgctcttgttgcccaggctggaatgcaatgatgtgatcttggctctgcaacctctgcctccggagttcaagcaattctgcctcagcctcccgagtagctgggattgcaggtgcacaccaccacacctaggtaactttttcttttcttttttttttttttttttgagatggagtcccactcttgtcgcccaggctggagagcaatggcgtaatctcagcacactgcaacctctgcctcccaggttcaagtgattctcctgcctcagcctcccaagtagctaggattacaggcgcctgccactacacccagctaattttttttttgtatttttagtagagatgtggtttcgccatgttggccaggctcgtctcgaactcctgacctcaggcgattcacctgcctcgccatcccaaagtgctgggattacaaagagccagcatgcccgacttccctttaattgattcgatccaactgtcttagctgcaggaggatagagaaaggacacataaggtcttgaaagtaccgttgggacactggttacttttcttggcagtgtgtagagattatgtgtctccatctcttgtgcagggctgtctgcaccagtcacatccattgttcctgggcttattgcttgggatgtgagggacagagaatctaaaggctttgtcttaaacgtactggcttggttttaaatacctcattaagtggttgagggaaaatgtaatctgcagtaataactcttaggatgaactgtaagaaccacgtcatggaaaattgacactggacaacatcatagaaggaacacctgtagaatgggaaacagcttgtcttctggtaatttagtacagactgaagttatctttatatcttggttcttcccatcttttcgatacgtgaatatccagaaattctcatctcaagccttgaaatcataaagatagtggttcagtatctgcttttgataacattttgttttgtttttctgatatgccaaaatgtatttatacatcttaaatgtaaaatgtagtcctgctatttaaaacttgttaacccatatagcatatagtcacaattcagtaattgtaatgcatgatgaatcaaatttctgtctgcatttgaaatttctatctacatatgcattctgctaaagaacagtattaagacttccagtttttcctaattcttatacaaatttaatgtgaacaccactcttcaaggagataggaagggtattctgttgctccagtcctacacatgcgtaacagtactaaataattaggtaatttgcctaaggtaatacatcaagagggtatatagagctcagatctcttgatggcttattaggattctttttgtgtatgtgacagggtctcactcttttgcccaggctggagcgcagtggcacgatcttggctcactgcagcctctgcctcccaggttcaagcaactctcctgcctcagcctcctaagtagctgggattacaggcacctaccaccactcttggctaattttttgtatttttagtagagatggggtttcaccatgttggccaggctggtctcaaactcctggcctcaactaatccactctccttggcctcccaaagtgctgggattacaggcgtgaggcaccacacctggcttgttaggatttttatgaaactgtgcttcccgtttgacgatgaattacaaggtttaaaagcaaaagattgatagttacatatgattcctgcctgcgacacttattctaacccctggagccattttcctttggaaaattgcctttagcacatgattagaagcaacattactgatcatctgctcacttttaatcctaaatggtatttcacagtttaatttcttagttcataagacttgatctcaacccacttttgtctgtttgtagaaagtaaattcattttcaaatcatgaacaatagtttcattcagaagcagaaaatgttaagaacttgttaggatcagtttttgttcctgaaggtgtcagggcctttctttaaaacttgctttctgataagtcctttctctttcaccttccacttctaattagggaccaagttctttgattatgtttcttaattttctctggttcaatttatttctgtctgtttccattgccactctccattcattcctcacctctggttttgctccctttggacccatccccactactgtccttagcctttctaaagtactactctcatcatgttcttctgcttaaattccttaattaatccctgggatatgcaaaatgaaggccaaactcatggttttagatgtagtgttatttaatcctgaacacataggtaggacttatcttcatcttaaagatgaggaaatgggctcactgtgattggtaacttgcccactatttcacagccaaggagcaatctagaaggatcaagaatagggcatgataatcaatgagtggataaagaaatcgtggtgtgtatataccatggaatactactcagtcataaaaaggaatgaagtaatggcatttgcaacaacctggatggaattggagaccatcattctaagtaactcaggaatggaaaaccaagcatcatatgttctcataagtaagaactaggctatgaggatgcaaaggcataagaatgatacagtggactttggggactcggaggaaaggggaaaagatgggagtaggatgagggataaaagactacacactgggtacagtgtacactgcttgggtcatgggtgcaccagaatctcacaaaccaccactaaagaacttattcatgtaaccaaccaccacctgttccccaaaaacctattgaaataaaaaaactaataaaaatttctgttaaatgtgaaaaaaggaatagggcatgaatctgaaaaggtagacagtcatataggaaatggtgcattgtgccaataatgttgaactttatctcttaagtgctggtgagccatatgggattttaagcaaggagatggtttgatctgatttgtattttagacgattcatttcagtgactagcctaaaatggaagtgggaagacttggacaccaattagaaaacttgtaatattttaggcaaaaaatgtaaaaagagaggtaaagtggtagaattgggaatggagaaaagagaattttatgagatactttattgattcccaatcaaaagtgcggggtaaagaagcctggaatagtgttttctggtttgagtggtttgagttgttttataccatctgttgcaccattcataacctttcatggtttaccaaatctgctttgctcttttatgccttcttgttgcataagctggttccttttgtctggaattctttttttttttttttaacttgccttttgaaagcacctactcatcttttaagaccttaggttaatgtcagacagtttaggaaccctttcccaagtctattctttgagctcaagagaacagaatatgtatttctacatatatttatgttacatttgatcatgttgagttatggtcattcatacgtttccttattgttggtaatttgaagtcagtcttagtcatatttatgatccagtcctctagtcagcctaggctgtcatattatgatactgattttctgttagaaaggccacatacacctgattttatcacatttgttgaagatggcattttattctatttagcttagatgattttcccctagaatgcaaaataaattggattaatgtatccatggcatacttctgttaaatgcaaagtgaatatggcttgtaattggggctatcctaccacacagtcaaaggttagcaatcaaattttaggtattgtgtaaacaaaagtagtcaattgtcagtagccattaagaaagtactagtgtgttccatttctgacagaatgctaggttatatagtattaactatactcccaattggagtaactacactggcaattacaaaatgaaaatatttatttttaaatgcttttctgagctggcacaaaaataaggaatctgtgtaatcccagcactttgggaggccgaggcgggcggatcacgaggtcaggagatcgagaccatcctggctaaaacggggaaaccccgtctctactaaaaatacaaaaaattagccgggcgtagtggcgggcgcctgtagtcccagctacttgggaggctgaggcaggagaatggcgtgaacccgggaggcggagcttgcagtgagccgagatcccgccactgtactccagcctgggcgacagagcgagactccgtctcaaaaaaaaaaaaaaaaaaaaaaaataaggaatctgtcaagctcccatataaatagaagcagggactgtgaattccaacctgcttttacttttttctagaaagtaaatccatttccaaagcatgaagagttgcttcaattgaggacagagaaaagttaagaatttgctagatcagcttttgtgtctgaagatgtcagggcctttctttgaaacttgcctaaccaagtgccaacaagtaggtctttcatgctgaaagtttctgctgaacgctgggaaccttgagctttgagggatatctaataggaaatcctccaataaagctgagaccccaaagggctccatacaaattgtaaaataggaaaataaacattcaattcatctccaatgacaatctgttggagatgaattgaaacatctttgccttcatcttggcgtatgttggaggaaatttccaagaatccataaccacaagtcaacttccatgtgggttcatggttaaattcactatctctgtggttcaaaaccatcaaccagagaatttaaatggacctaggttggtagtatgtaggtggccgatagaagcaaataaaaattatcttctgagaaactctccttcaattcaggcctcaaagaatactacaggtaaggttcaaagggaaatgaatagctcacagtcaaaaaccacaaacacagagagaggccaagatggctatttgaagcagctgctgtccatggcactcatggagaggaatgaaagcggtgagtgaattcagccccttaactgaaatcgccaggttctcacattgtgactgactaggcaaacaacccacgaagaactgaggaaagaagggtgaggcaatggcccacccaggagtggcacagagccaaaggaaccccaatccccagccaagggaagcaatgagtgaatgtgcgaccctgcctgggaaatcatgcttctcccatggatctctgcaatccatggatcaggagacctgctcatgagcccaggccaccaaggccttgggttcaatacacagagctgtgtggagttctggcagactggccactcaggcacacacacagagactcaggagttttacatctgttgtccccaggatccctggcaaggtgggaaacccgtttgtacataccctggggaaaggggctgaatccagggagcccagcagcatcattctgtgagtccaacttccacggcacctcacaagttaagacccactggcttggaattccagcccaccaatggcaacaggctggagtctgcctgagttaggaccatgttccctgaacggagggagagccgccatctctgcagtttggttgactcagccatttcagcctgatggctttggagaatccagatggtccagatgagtaagggtcccccacaatacagcacacctgctttgccagattgtggccagactgcttctttcagtgggaccccaattcatttctccttactgggtggggcctccctgcaggaacttcagccactttagccagggttatatggacagagctctgatctcttcctgggatggagatccagggggaggggtggccaccatctctgcagattgatcaactcagctgttccagcctgatggctttagagagtccaagtggtctgggcaaggaagagtccccccaacacagcacacctgctctaccaaaaagcagccagatggtttctttaagtgagtttctgatcccattcctcctgactggctgagacctcccaacaggggtctccagacaccttctacaggagcgttcaggctgacaacaggtcactgttcaactgggacagagcttccagaggaaggagcaggctaccatctttgctgtttcataaccttcactggtgatacctccaggtatggggaaaaactgaggcaactagggtctggagcaagcccccagcaaactgcagcagtcctatggaagagtggcctgactgttaaaagaaaaacagaaaacaacaacatcaagaaaaaagaccccacaaagatgccattcaaaggtcagcaacctcaacaatcaaaggtagataagtccacaaagatgagaaagaatcaacacaaaaacactgaaaactcaaagctagagtgcctcttctcctccaaatgaccacaacacctctccagcaagggcacagaactgggctgaggctgagatggctgaattgacagaagtagccttcagaggtgggtaataatgaactttgctgagctaaaggagcatgttgtaacccaatgcaaagtacctaagaatcatgataaaacaatacaggagctgatagccagaatagccagttttgagaggaacataactgacctgaaggagctgaaaaacacaatacgagaacttcgcaatgcaatcacaagtgtcaatagcagaatagaccaagtggaggaaagagtctcagagtttgaagaccatttttctgaaacaggcagacaagaagagagaaaaaaagagtgaaaattaatgaataaaatctctgagaaatagattatttaaagagactgaacctatgactgattggggtacctaaaagagagggggagaatggagccaagttggaaaacatacttcaggatatcgtccaggagagctttcccaacttagcaagacaggccaacattcaaattcaggaaatgcagagaaccccaataagatacgctgtgagaaggtcatctccaagaaacataattaacagattctctaaggtcaaaatggaagaaaaaatgttaagggcagccagagagaaagtccaggtcacctacaaagggaagcccatcagactaacagtagacctctcagtggaaaccctaagccagaagaaattgggagccaatattcaacattcttaaagaatttccaattcaatatttcatatttagccaaattaagcttcataagtgaaggagaaataagatctttttcagacaaacaaatgatgagggaattcatcaccaacaggcctgccttgcaagagatcctgaagaaagcactaaatatggaaaggaaaaactgttaccacctgctacaaaaacacactaaagtacagagaccagtgacactatgaagcaaccacataaacaagtctgcaaagtaaccagctagcattaggatgacaggaccaaattcacacctaacaacactaatcttaaatgtaaataggctaaatgctccaattaaaagacacagaatggcaagctggataaacagccaagactcatcaataggctgtcttcaagagacacatctctcatgcaaagacatacataggctcaaaataaaaggatggaggaaaatttaccaagcaaatggaaaacagaaagacgcaagggttgcaatcctagtttctgacaaaacagactttaaaccaacaaagataaaaaagacaagggcattatataatggtaaagggttcaattcaacaagaattgaatatatcctaaatgtatatgcacccaatacaggaacacccagatccataaagcaaattcttagagacctacaaagagacttaaactcacacattactagtggtagactttaacaccccactggcaatattagacagataattgagacagaaaattaacaacaatactcaggatctggatcctgaactcagctctggatcaagtggacctgatagatgtgtacagaactctccacccaaaaaaaacagaacatacattgttctccacatcacgtggcagtcactctaaaattgatcacataatcaaaagtaaaacactcctcagcaaatgctattaaaatagctgagatcataacagcagtctttcagacaacaacacaatcaaattagaactcaagattaagaaatttactcaaaaccacacaaatacatagaacaacttgctcttgaatgactcgagtaaataatgaaattaaggcagaaatcaagaagttctttgaaactaatgagaacaaagagacaatataccagaatctctgggatgcagctaaagcagtgttaagagggaaatttatagcactaaatgcctacatcaaaaagctagaaagatctcaagttaacaacttaacataactactaaaagaactagaggaccaaaagcaaacaaaccccaaagctatcagaagacaagaaataaccaagatcagagctgaactgaaggagatagacacaaaaaaaaatccttcaaaaaataaatgcatccagaagctggctttttgaaaaaattaataaaatagactgctggctagactaataaagaggaaaagagagaagaatcaaatagacacaatcataaatgataagagggatatcaccactgacccaacagaaatacaaatgaccatcagagaatactataaacacttctatgcacataaactagaaaatctagacaaaatggatacattcctggacacatatacccacccaagactgaaacaggaagaaattgaatccctgaatagaccaataatgagttctgaaattgtggcagtaataaatagcctaccaaccaaaaaaagtccaagaccatatggattcacagctgaattctctcagaagtacaaaggagagctggtaccatttctactaaaactattcaaaaaattgaaaatgagggactcctctctaactcattttatgagaccagcattatcctgataccaaaacctggcagagatacaacaaaaaaagaaaacttaaggtcaatatccttgatgaacattgatgcaaaaatcctccataaaatgctgggaaactgaatccagtagcatatcaaaaagcttatccaccactatcaagttggcttcatccccatgatgcaaggttggttcaacatacgcaaatctataaatgtgattcatcacataaacagacctaagacaaaaaccacatgattatctcaacagatgcagaaaaatcctttgataaaattccacaccccttcatgttaaaaattctcaaactagattgtgaaggaacatacctcaaaataataagagctatatatgacaaacccacggccaatatcatacttaatgggcaaaagctggaagcattccccttgaaaatcagcacaagacaaggatgtcctgtctctcaccactcctattcaacatagtattggaagttctggccaaggtaatcagacaagagaaagaaataaaggatattcaaatagtaagagaggaagtcaaattatctttgcagattacatgatcctatatgtagaaaaccccattgtctcagcccaaagtttcttaagttgataagcaacctcagtaaagtctcagaatacaaaatcaatgtgcaaaaatcacaagcatgcctatacatcaacaacagacaagcagagagcctaatcatgaatgaactcccattcataattgctacagaaagaatcaaatacctaaatatacagctagcaagggaagtgaaggacctcttcaaggagaactacaaaccactgctccaagaaatcagaggggacacaaacaaatgaaaaacattctatgctcatggatagaaagaatcaatatcatgaaaatggccatactgcccaaagtaattaatagattcaatgctatttcattaaactatcattgacattcttcacaacattagaaaaagccattttaaaattcatatggacaatcctaagcaaaaagaacaaagctggaggcatcgcactacccaacttcaaactatactacaagcctacagtaactaaaacagcatggtactggtacaagaatagacacataaatcaatggaacagaatagagaacacagaaataagaccaaacacctacagccatctgatctttgacaaagctgacaaaaacaagcaataaggaaaggattccctatttaataaatggtgctgagagaactggctagccatatacagaaaattgaaactggaccccttccttacaccatatacaaaaatcaactcaagatggattaaagacttaaatgtaaaaccccaaactataaaaaccctagaagaaaatctaggcaataccttcaggacataggcacaggcaaagattttatgattaaaacgccaaaagcagccaggctcagtggctcacgcctttaattgcagcacttagggggtccaaggtgggtggattacctgaggtcaggagtttgagaccagcctgaccaacatggtggaacactatctctactaaaaatacaaaacttagccagacgtcatggtgggcacctgtaatcccatggtgggcacctgtaatctcgagagactgaggcaggaaaatcacttgaacctgggaggcaggggttgcagtgagcgaatatcatgccactgcactccagcctaggtgacagagcaagagtctgtctcaaaaataaaataaaataaaataaaataaaataaaataaataaaaaaacgccaaaagcaattgcaacaaaagcaaaaattgacaaataggatctaattaaactaaagagcctctgcccagcaaaataaactatcatcagagtgaaaagacaacctacagaatagaagaaacgttttgcaatctatccatctgacaaaggtcaaatatccagagtctacaaggaacttaaacaaatttacaggaccagaaacaaacaactcctttaaaaggtgggcaaagtacttgaacaggcacttttcaaaagaagacatagatgtggccaacaaacgtatgaaaaaaaagctcaacattgttgataattacagaaatgcaaatcaaaactgcaatgagataccatctcataccagtcaaaatggctactattaaaaatccaaaaaaacagcagatgctggcaaggttgcaaagaaaaagaaacactattacactgttggtgagagtgtaaattaatttaaccattgtggaagacagtgtggtgattcctcaaagacctggaggcagaaataccatttgacccaacaatcccattactgggtatatacccaatgaaatataaatcattctatcataaagatacatacacatgtatgttcattgcagcactattcacaatagcaaagacatggaatcaatccaacggcccatcaacgacagactggataaagaaaatgtggtacatattagtcaggcatggtggtggtgcacacctgtaatcccagctactctggaggctgaggcaggagaattacttgaacctgggaggtggaggttgcagtgagctgagatcgtgccactgcactccagttgagactccatctcaaaaaaaaaaaaaaaaacaaaacaaaaaaacaaatcacaaatgcacaagataccaagagtgaaaactagcagagcaaataagcagtaatagttacttgaattatcagatacagaatataaaatgaatgtttaatatgttaaaaggaaagcttgaaagagccaggaaaaggagactatcaaatctatttagaagaaaagaaaaggatcaaataaaacttcaagaattgaacaatataaagattgaaataataaactcagtgaatgatgggatggtgactcccatcacctccaccctgacacacacacagaatttcccttctcattttagcaaagaaagaataaaaacatgagttttgtgttggtaagcagttgtctagctagtgactctttcctctcttgcttttatttagatatttggttagttaatacattatattaaccaataataaagcaatgaactcctgtgaaaacagaagttacaactttagcaataacctatatctaaccatacattttactcagtatctcattttcccacctttcctgacaaaaggtaatcatcctgaatccaggtggtaagggtttgcttgcttttcctcctaattagtttgttatatcttttcccccctccctcccctgatagatgaatgaatggatacatggatatattttgttgtcgatacataataatgtacgtatttatgatgtacatgtgatattttgatatttgcgtacaatgtataatgatcaaatcagggtaattaagatatccgtcacctcaaatattcatcatttctttgtgttcataacattccagatcttcttttctagttatttaaaaatatacaataaattattgttaactatatgatatagtttgtatatttgtttcctcaaatctcgtgttgaaatataatccctaatgttagaggtggggcctggtggtaggtgtttggatcatggggcagatccctcatgaatgatttagcattatccctttggtggtgagtaagttctcacaacatctggttgtttaaaagagtgtggcacctccctggccctacaccttgctcttgctctggccatgcgacctgcctgctcctgcttgcctgccaccatgagtaaaagctccctgaagccttcccagaagccaagcagatgccagcaccatgcttcctgtatggcctgcagaactgtgagcccattaaatctcttttctttatgaatcacccagtctcaggtattcctttagagcaacaaaagaacaacccaatacagtgtgttaccctattgtgctatcaggcactagaacttcttccttctaactgtatttttgtacacattacccaacctatctttgtcatccacctcacccttcccagactctggtaaccattatcctactctccaccttcatgagatcaactttttaagctcctgcatatgagggagaatatgtaatagtagtcttctgtgctttgcttatttcacttaatacctccagttccatccgtgttgctgcaagtgacagaatttcatttttttatggctgaataatattcactgtgtatgtttaccacattttcttcatccattcatccactgatggacacttacattgatttcatatcctggctattgtgaataatgctgcaataaacatgagagtgcaggtatctcttgaagatactgattttctttcttttaaatatatacctagcagtgggattgctggatcacatggtagctttatttgtagttttttggggaatctctatactgttttccatagtggcaatgctaatttacctccctgccaacagtgtatgagccttcccctttctccacagccagcatcattattttctttttgatagtagtcattttaactggagtgagatgatatctcactgtggttttgatttgcatttcccttaggattaatgatattaaatattttacatatttttttcagatcatttgcccattttaaaaatagggttgcttggtgttttttttgtttttgtttgttttgtgttttgttttgttttttgctattgagttgtttgcagtttttatatattctggtactatcccttgtcaggggaatagtttgcaaatattttctcccattcagtataatatttcttctttctgttgattatttcctttgctgtgcagaagcttttcagcttgatgtgatctcatttgcctgtttctgctttggttgcctgtgcttttgagatcttgcccaaaaaatctttgccaagactaatgttctgaggtgcttccccaatgttttcttctagtagtatcatagcttcaggtcttacattcacgtctttattctttttttatttgatttttatatatggtgagagataggggtctagtttcattcttttgcatatggacatctagttttcccacaccatttactgaagagactgtcttttcctcactgtatgtttttggtacctttgtcaaaatgaattggctataaatgcgtggatttatttatgggttttctactctgttccattggtttacacatcagttttatgccagtaccatgctcttttggtacgatagctttgtggtatattttaaagtctggtagtgttatgccttcaactttgttcctgttgttaaggattgctttggctatttgttgtgtttttgtttttgtgtttctatacagattacaggatttttagaaatggctgtgcttggtgttttgataggggttgcattgaatctgtagatagttttgactggacattttaacaatattaattcttccaacccataagcatgggatgtcttttcttttcttttttttttttttttttggttcctcttcaatttctctaatcagtgttgatcatagtttttgttatagagatctttcacttttttggttaaatttattccaaggttttttttgtatctatcgtaaatggaatttacaataaagaacacttactacaaagatttacaattaaagggattgctttcttaattttttatttatttatttatgtatttatttgtttgagatggagtctcactctgtcacccaggctggagtgcagtggtgtgatctaggctccctgcaccttccgcctcctgagtttaagtgattctcctgcctcagcctcctcagtagctgggactgcaggcatgtgtcactacaccgactaatttttatatttttaatagagatggggtttcaccatgttagccaggctggtctggaactcctgatctcaagtgatccacgcgccttggcctcccaaaattctgggattacaggcatcagccaacgcgcctggccatttttttttttttaggttgttcacagttggtgtatagaaatgctactgatttttatatgttgattttgcatcctgcaactttattgaattagtttgtcggctataacagttttttagtttaggtttttctaaatataggatcatgttgtctgcaaaggaggatgatttgacttcttcctttttaattcggatgtgcttcatttctttcacttgcctaattgccctatctaggacttccaatattatgttgagtaaaagtgatgaaagtgggcatccttgtcatgttccagaccttaaaaggaagtcttttaattttccccattatattaactatggatttgtcatatatggcttttactgttttgaggtatgttccttttatatacccagtttgttgcatgtttttatcatgaaggaatgttgaattttatcaaacactttttcagcatctattgaaataatcatatggtttttgttcttgattctgttagtgtgatatatatttgagtttaggttctatttttatattttatgaaaaagctatatctatagtattttgggattttcccccttaataaccttttgctaagcttcatgttgttttttatagatgtataatatttcattacatgttgttttttaaaaaaatccactttcccattgatgaacattttggttatttccagatttttctctagtgaactgcactactatgaacgttcttgtatatgtgtcctgctatacaagtgtcaaagtttcttttgatataggaaactgctgctatatcgtcacattgctggatcataaagcatgtgaatgctcaactttaaaaggtaatgccaaacggtttcccaactggttacaccaatttattctccagatcttccccaacatttgatatttcagacttttaagttcttcccaattaacacagtttaaaatagtattgcattgcgatcttgatatgacttttcctgatcactaacaatgagcagcctatgtatgcttattggacagatatgtttcctcactcaagtttctgctcatcttcccattaagttacttatccttcccttattgatttgttattgtcatttatgtattatcgatccaacttgttcataggtgtgtattgaaaatatcttctcttagtaacttttcttttcatgtttttgaagttatgttttgatgaacaatagttatgaacaccaattattcagacattagtacttataaaaattaatagatcttgtatcttattaaaagataaaggccgggtgcagtggctcacgcctgtaatcccagcactttgggaggccgaggtgggcaggtcacctgaggtcgggagttcgagaccagcctgagcaacatggagaaaccccacctctactaaaaatacaaaattagctgggtgtggtagcaggtgctggtaatcccagctacttgggaggctgaggcaggagaatcgcttgaacgtgggaggcggaggttgcagtgagctgagatcgccccattgcactccagcctgggcaacaagagtgaaactccgtctcaaaaaaaaaataagattttaatactaagatttaaaaatatttacctcatattttatttatttgtttaaaatttttaaaatttcagcttttattttagattcaagggatatatgtgcacatttgttacaagggtatgttgagtgacactgagattgagggtataaatgatcctataacccacatagtgagcacggtacccaataggtagtttttcagcccttgccctcaccattagtcctcagtgcctgctgttcccatctttatgtccatatgtactcaatgcttggctgtcagttataagtgagaacatgtgatacttggttttctgttcctgcattaattcgcttaggataatgtcctccagctgcttctatgttgctgcaaagtatctgattttattatttttatggctatgacatatttcatggtgtagcatgtaccacattttctctatccaatccactcttgatgggcatttagtttgattccatgtctttgctattgtgaataacgctgcaatgaacatatgagtgcatagggctttttggtggaaagatttattttcctttgagtatatacccagtaatgggattgctgggtcaaatggttctgttttaagttctttgagaaatctccaaactgctttttacggtggctgaactaatttacattcccaccaacagtgaataagtgtttcctttcctccacagcctcatcaccatctgtttttgtttgtttgtttgtttgttttagacggagtctcgctccctcaccagggtggagtgcagtggtgtgatctcagctcactgcaacctccacttcccgggttcttctgcctcaccctcccgagtagctgggattacaggcatgcaccaacacgcccagctaatttttgtatttttagtagagacagagtttcaccatgttggtcaggctggtctcgatctcgtgacctcatgatccatctgccttggcctcccaaagtgctgggattacccgcatgagccaccgcacccgccttctgttattttttcactttttaataatagccattctgactcatatgggatgatatctcattgtgattttgatttgcatttctctgatgatagtgatgtttaacattttttcatatgtttgttggccatgtgtgtcttctcttaagaagtgtctgtttatgtctttggcccactttttaatggggttatttgttttttgcttgttgaattgtttaagttctttatggagtctggatattagacctttctcagatgcacagtctgcaggtattttctcctgtaggttgtctgtttagtctattgatagtttattttgctgtccagaagctccttagtttaattaggtcccattggtcaatttttatttttgttgcaattgcttttgaggactaagttataaattatttcccaaggccgatgtccagaatggtatatcctaggttttcttctaggattcttagtttgaggtcttatatttaaatctttaatccaccttgagttaatttttgtatacagtgaaaggtaggggttcagttttattcttctgcatatggctagccagttatcccagcaccatttaatgaatagggtgtcctttccccgttgcttatttttgttgacttccttgaatatcagatggctgtaggtatgtggctttatttctgggttctctattctttatcatttaccctgtattttatactgagagttttaaagttctattcctgagtttaagccctaaatccatttggaattgatttttgtagacggtgtgtggtaggaattcaatttcaaattttccatgtgaaaatcattttttccagctcgatttgttaaacaatcaactacttcttttcatatcgatcatgcattccatatttatcatatgaaaatgttcctaacatacatgcatttttaggctgtcagttttattccattgaccaatttatttatccctgaactaataccacactgtctttattacagctccataataaatcctcatatctgatcccctctctctgctcttcttaacaggtatcttggttattcttgacacccttttcctccatatgtattttaaaaatagctctgttgaactataatccacataccacataattcagccatttaatgtgtacgatttaacagtttttagtatattcaaagatatgtgccaccattgccacagtcaattttagaatgttttaattacctcaaaaaactcacatactctgacaagctctctctcactctaaccctgcccagtcctaagtaaccactaatctactttccttctatagatttccccggtctggactttcacacaaatgggattagataatacgtggacttttatgtttggcttcttaatggattttcagagttcatgtaagtaccatatattagtacttcatttgtttttatgactacataatattccattgtatgaatatgaatatgactaaataatattccattacacgaatataccactttttaaatccatttatttgttgcttaacatttgtggtgttgtttccaccttttggctattatgaataatgctgcatgaatatttatgtgtggatttcggtgtggacgtatgttttcatttcttatgaatattcctagaagtggattttctgggccatatgttaacactacgtgcaaccatgtgaggaactggcagactgttttctaaagcagctgtacaatctcacattctcacatagcagtatatgaggattttgatttctttactttttttgttctccctaagagttttatagtctaaaactataaagagcaaaactcttacacttatatccttgactcattttgagttacctttgtatttgatgtaaaataagagaccaacttcattcttttgtatgtagctatccagctgttctttccccactgaacagtcttggcactttgctgaaaatcagtaggccatagatgcatggatttatttctggactctcaagtttactccatttattgatatattagtccttgtactagtaccacattgtcttgattatcattgttttgcagtaggttttgaaattgggaagtatgagtcatccccctttgttctttttcaggattatttagtgtattggtccatcttatgttgctataaagagatacttgaggctgggtaatttataaagaaaagaggtttaattggctcaaggttctgcaggctgaacataaaggaagcatagtgccagcatctgcttctggtgaggctttaagaaacttataatcttggcagaaggtgacagggagcagggagccagcatgttccatggcaaagggagagcaagagacaaagggggaaggtcccagacttttaaaaatagccagatgtcatgtgaactcagagtaagagcccatttatcacaaagaggatggtgccatgccattcatgagggatccacccccatgatccaataccacccactaggccccacctccaatattagagatcacattttaacatgaagtttggaggaggcacacatccaaaccatatatttttcccctgctccccctaaatctcacatccttttcacattggaaaatacaatcattccttccccaaagttcttcaaaatcttaaagcattctagcatcaactcactcaaaagttcaaagtccaaagtctcatctgaaactgaagtcaagtttcttccatccatgagcctgcaaagtcaaaaccaaattatttacttccaagatgcaatagtggtgtacaggcattgagtaaacattcccattccaaaagggagaaattggcaaaaagaagagggtacaaggccccatgcaagtctgaaacccagcagggcaggcattaaatcttaaagctccagcataattcttaactctgtatcttgcatcctggtgcaagggatgggctcccaaggccttgggtagcttcatccctgtgcctttcctgggcacagcccatgtgactgctctcgtgggttagagttgagtgcctgcagcttttctgggctcagggtgcaagctgcaagtggacctaccattctggggtctagagggtggtggacccttcccacagctccactagtatggactctgtgtagggtgctccaaccccacatttcccctcagcattgccctggagtttctctatgggggctccaaccctgtagcaggcttctgcctgggcacccaggcttttccatacatcctctgagatctagctggcagatgccaaaccaagatttccttcattcttgcattctgtatttctacaggcttaacaccacatggaagcttccaaggcttatggcttgcatgctctgaagtgggagcccaaggtatacctgaagtcctttgagccacagctggagctgtagcagcagggttatggggtgcagcctcttgaggtagtgtagagcagcagagtcccagtcctgaaccttgaaaccattttttcctactaggcctttgggcttgtgatgggaggggctgccttgaagatctctgaaatgcctttgagactattttcccattgtcttggatattagcagtttgctcccttttagtcatgctaatctctctagcaactggttgttccacagcctgcttggattctttctctaccataaggccaggctgcaaaatttctaaatgttgacactgcttcccttttaaatataagttgcaactttaagtcattcctttgctcccacatctgataataggttgttagaaacagccataccacttcttgaacactttgttgcttagaaatttcttctatgaaatttcgtcactcttaatttcaaatttccacagatctctaaaacatgcacacaatgcagctgagttctttgctagggcataacatgggtaactccagttgatagggcataactccaataactggagttatttcctcatttccatctcatcagcctggacatcactgtccatattttttcagcattttaatcacaataatttaatcagtctctaagaaattgcaaactttccctcatctttctatcatcttctccaaactcttccacctctgcctattaccaagttgcaaagccacttccacattttcaggtatctttgtagcaatgccccacaccttggtaccaattatctgtattaattcattcttgtgtttctataaataaatacctgaagctgagtaatttataaagaaaaagttaataaaacttctttataaaactttataaaacttataaagaaaagcttaatttgctcacagttttgtaggctgtagatgaagtatatcagcatctggtgaggctcatcagcttctggtgaggcctcaggaagctaagaatcctggtggaaggtgatggagagccagcatgtcacatggcaagagcaggagcaagagagagagagagagtcggagaggtcccagactcttaaacaaccagatctcatgtgaactcagagcaagagcacatttatcacaaaggggatagtgctaggccattcatgagggatctgccccatgatctaacacctcccactaggccccacctccaacactggagatctcatttcaacgtatttggatgggacacacatcatatcctttggctatgctagatcacttgcaattttatacagattttaggataaaattttcaatttatacaaagaagtcagctgagattcttagagggagtgtgttcattctttagatcagtttgggaatcagtttatcattttaacaatgttaagtcttccaatccataaatatgggatgtttttccatttatttaggtcttctttaatttctttcaacaatattttatagtttttagggtataagatgtgcacttttttggataaatgtattcctaaagattttattttatttattgtttattttacttttttattttattatttcattttattttattgagacagagacttgttctctcaaccaggctggaatgcagtggcatgatcttggctcactgcaacttctacctcctaggttcaagcaattcttgtgcctcagcctcccaagtagctgggattacagtcatgcatcaccatgcccagctatttttttgtatttttggtagagatggggtttcaccatgttggccaggctggtctcgaactcctggcctcaaatgatcctcctacctcgatctcccaaagtgctgggattacaggcatgagccaccacatctggccttattttattttttgatgctattatgaacagaattattaggtccttccttccttccttccttcctgccttcctgccttccttccttcctgccttcctgccttcctgccttcctgccttccttcctcccttcctcccttccttccttcctcacagtatcactctgtcacccaggctggagtgcagtagcacaatcagctcactgcagccttctcttccctgggctcaagagatcctcctgtctcagcctcctgagtagctgggactataggcatgcaccactacacctgactaatttttttttattttttgtagagacaggattttgccatgttgctcaggctggtcttgaactcctggcctcaagtgattctccatcctcggcctcccagagagctgggattacaggtgtgagccactgtgcctgccccagaattgttttcttaatttcattttcagatgttcactgcaaatgtatagaaatacaattgatttttatatagatactgtatcttgcaaccttgctgagttcatttattaattctaattcttttttcaaaaagtagattaattcatattttctatatacaagatagtttacttcttcccttcctatctgggttttgttttgttttgtttttgttttttttgagacaaagtctagctagacatagtcaccctgactagagtgcattggtaccatcttggctcactgcaacctctgtctcctaggttcaagtgattctcccacctcagcctcctgagtagctgggactcaaggtgcacgccaccacgcccagctaatttttgtattttttggtagagatggggtttcaccatatcagccaggctgttctcaaactcccaacctcaagtgatctgcccgccttggccttccaaagtgctgaaattacaggcatgagccattgcatctggccttcctttcctattcagatgccttttatatatttttcttgccaagtttctctggataaaatctctggtaaatgttttagtagagatggggtttctccatgttggtcaggctggtctcaaactcctgacctcaggtgatccgcctgcctcggcctcccaaagtactgggattacaggtgtgcgcctccgtgcccagtcatgtttgttttttttttaataccataaaggcatgctggattttgtcaaatgctctttgggcatccattggcatgattgtgtgatctttattctattgatatgtatgacattaactgattttcagatactgaaataacttacattcctgggataaatcctagttagtcatggtgtgtaattcttatatgttgctgtatttgatttgttagcattttgtcaaaaatttttgtgtacgtattcttaagagataaatagttttattttcttgtgacgtctctgtctggttttgtcattttattctaaaataatttgggaagtgttttctcctcttcaattttcagaagagtttgtgaaataaagaattggtattaattcttatttaaatatttggtagaatttataggtgaagccctctgggcctgatattttctttgtgagtaattttaaaactactaactcagcctttctaggtgttatgggtctattcagattgtttatttcttcttaaattaattttggtattttgtgccttcctgggatttgtttatttctttttttgggcatataatcattaattagaattcctttctaatactttttattgttgtaagtttatagtcctatatcctctttcattcctgattctagaaatcagtcttctgtatttttattagggtcagtttagccaagtgtgttaattttattgatgttttcctagaacaagttttttgttttattgatttatctccattgtttgtctgttctctatttcatttattcttgccctgatcttaattatgttcataccttcacttgctttaggttcagtttgctcatctcctagggtcttaatgtataagattaggttattgatttgagatcttcatataggtatttacagctataaacttttctctgtgtattgctttggctgtatcccataaattgtgtcttcatttttatcatctcaatgtattttatgatttctatttttatttcttctttgacctattggttatttaagagtatgttatcttattttcacatatttgtaagtttctcaatttttttatgttatcaatttataatttatttcctttgtattcaaagaatattccttgtgttatttctgtcctttcacatgtattaaaatgttttatggctttgtatatggtctaccctagataatattttatgtgcatttgagataaatgtatatttaattgttgaataacagactgtcttctttcttacagaagttttgcaggttttcttgaatagatgattcttcatttactctttgctgtcagaacatttctagaggctgttttattaaaaaagtaatttttactcctcctaactaaaatgttgtacactttaaccaataactccccatttcctcgcatctcccctgacctctgctaaacattttccactccacttctatgaattaattttttttagattccttatataagtgagatcatgcagtatttgtctttctgtgcctgccatgtttcacgtagccttatgtacttgaggttcatccatgttgtcccaagtgagagttttgttctttttaaaggctgcatagtatttcattctgtatatctaccacattttctttcttgcttgcttgctttctttctctttctttcttcctttctctctctttctttctttctttctttttttttctttctttctttctttctctttctctctctctctctctctctttctttctttctttctttctttctttcatctttccttctttctttggagtctcactctgtcaccaggcaccatctcagctcactgcaacctctgactccctggttgaagcgattctcctgccccagcctccagagtagctaggattacaggcacgcatcaccatacccaactcattttgtatttttaatagagatggggtttcaccatgttagccaggatggtcttgatctcctgacctcgtgatctgcccgcctcggcctcccaaagtgctgggattacaggcgtgagccaccgtgcccagcctaccgcattttctttatcaatccatctgttgatagacactcagatggattacatattttggctattataaataattctgtaataaattaggaattgtacatatcccttcaacatattgatttcagttcctttggatatattcacagaagtagaattgctggattatatggtagttctatttttactttttttgagggacctccatactgttttccataatgctttacttcagttttttcttaatccttgaaagtctttatttctccctcactcttaaaagataacttttattgatataggattcttggatgacagttttgtttctttctttgagcattttaaatatgttatcccgctgcattctggtttccacaatttctgtgaaaacattagctgttaatcttattggagtttctttataattgatgactcatttttttccttgctgctttcaggatttcttcccttccttcttcccccaaccacttatttctgttttggattgcagcatttttaccatcatgcatctgtttctagatttgtttgtgtttatcctgtttagtgttcattgagcttcctggatgtgtaggttattgtttttcaataaatttgggaaatttcttctcactattacttcgaataatctttcatattctttctctcctcttcttctgttactcccattacataaatgcacagtgtcctacatttctttgaagctctgttcatatttttcattctgttttttttctgtctttttctggcttgcataatctgtttgatcagtcttaaggtttgctaattatttcttatgccagttcaaatctactgttgagctcctctagtgaattttttaaaatttcagttgtacttttcaactttataatttccatttgtttctttttaatgctttctctttattgatatcttttatttgacgtgactttgtcatcatacttcctttactcctttagttatattttccttagttccatgaacatatttataatgactattttgaaatcttgttgtgttaaatctaatatcttgttgtaatcatgggaagtttatgttgcctgtttttaattttatttttctgttgtatggtttatactttctgattctttacatgccttataagtttttgttggaaattggacattttagatactgtagaaatatcagcactcatccttcccctctggggttttttattagcctgtttcatttttagcaactggttggataagtttagtgaagtttacttcctttgtaccatccccctgcccccgacccagtgtgttaagcctctgatgctgttcctgaaaaggtgcagcatatggtggcatacccagccaccatagctcactacagccttgaacttctgggctcaagtgatcctcccactttggcctcccaaaatattctgggaccacaggtgtgaggtactgcatccagccctgctttaattttttataggatgatttatgaaattaaaaaatttcttttgcatccgttttcatgttaatttctctatatcatctaagttgttacatttgttggcatatgaatattaatactttttttttttttttgagatggagtcttgctctgtcacccaggctgggtgcagtggcacaatcttggctcactacaagctctgcctcccaggttcacaccattctcctgcctcagcctcccgagtagctgggattacaggcatgtgccaccacgcctggctaattttttgtatttttagtagaaacggggtttcactgtgttagccaggatggtctcgatctcctgacctcgtgatccgcccgcctcagcctcccaaaattctgggattacaggcgtgagccaccgcacccggccaatacttttctttttaatacaattcatctattctcttttttcattagtgatattgttctcatcttctctttttttcattgattaatcttaccggagatttgtccactgtgttagtttttttgaaatcaccttttgcttttcttttctattttatttgtttctgctgttatttttattacctcatcatctactttctttaggtttactgtgttgttatttttctaacttcttaacatggacattagacccaataattttgaacctttattcttttttatgtaaacatgtaaggttatacatttctaagaatgggtactgaaccataccatacatttcaatatatagtggtttcactatatttctgttttaagtttccttcaaatttcaattgtgattaattttttgctccaggggttatttaccattatgttttaatattctcaaatatattttgttattaaattgtcacttaattatattgcagtcagaggtattagtacatatagtatttatttgaaattgaaattttttaggaataataaatgatcattaaaaaaattttctggccaggcatggtggctcacacctgtaatcttagcactttgggaggcctaggctggcagatcacctgcggtcaggagttcaagaccagcttgaccaacatggagaaaccccatctctacttaaaaaaaaagaaaaaattagccggacatagtggcacatacctgtaatcccagctacttgggaggctgaggcaggagaattgcttgaacctgggaggcggaggttgcagtgagctgagatcacaccattgcactccagcctgggcgacaggagcgaaattctatctcaaaaagagaattttttttttctcagtgcttgagaaaaatgtgcattctctaattgttaggttcagaattttctgtgggtattagatcaagcttgtttactttgtcattcagatcttttatatttttgctgatttttgtttgtttaatggcagagtaaatttaaagaaaatatcgagaaggacaaagaacttaagagttgagctaccattcaacagggcaatcccactactgggtatatacccaaaggaaaataaatcatttaactaaaaggacacatggacctgtacgttcattgcagtactattcacaatagtactccatggatgcagctggaggccattatcttaagtgaactaatacagaaacgaaatcaaatacttcatgttcttatttatgagtggaagctaaaccttgggtacatatggatgtaaagatggaaccaatagacaatggaaactgctagagcgtgaagagaagaagtaggggaaagactgaaaaactacctattgggtaccatgctcgctacctggatgacggctttgatcataccccaaaccttgcaccacataaatgcccatataccaaacctgcacatgtacccctgattctaagataaaagatgaaaaaacattaattgtaataaactgattcactgttcaatttatgctctatgccttgcaacaaaaggtttgtagacatgaaagaaaggagatattacagttttgatcttgttagagacaaggaagcatcactgttttggaggaaaggtgattccctgacatagccatagccacatgtctgttaataggtaagccttctcatctcactctgtaccctttcttcataatactgacctgtattgaaagaataggctcttgataaatatttttaaataaatgaatgaataaaaagtaaaagaaaaacaaaagaaaatagaaggaagtttttagtagtagtaatagcagtattttttgagacagagtctcactgtcgccaggctggagtgcagtggcgcaatcttggctcactgcaacctctgcttcccatgttcaagcaattctccttcctcagcctcctgagtagctgagattacaggtgcccaccaccactcccagctaatttttgtatttttagtaaagacggggtttcatcatgtggccaggatggtcttgatctcctgacctcgtgatctgcctgcctcagcctcccgaagcgctgggattacaggtgtgagccactgtgcccagccagaaggaaattattaatcgcagaaataaaagagggagaatccaatgacaaaatttaatagggaggatcaatcaagaaaaaaatgtatttatctggaaggggtgatgaaaggataaaccattggtaagatttctatttctgtgtaaagaaagaaaaggtgcaaaccacactaggattgaataggggtctgtaatagacttgctgcagagactaaacagtggaatgttagggaaaaaatgtatgctgataaacttgcaaacttagtggaaataaaaaaaaaacgaatagagaactatagtttaccaaaacttattcaaggagaaatagaaaacactagttctacaattattaaagtcaatgaaacataattttaaaatattaaaaaacataccataccttaatgcttggttttagtggtagttctaccaaatataatagaacagataatttcaaattttcccaaatttttcagagaatagaataagagggggacatgctgtgactcttctttttttttttttttgagacagagtcttgctctgtcgcccaggctggagtgcagtggtgcaatctcagctcactgcaagctctgcctcccgggttcaagccactctcctgcctcagcctcccgagtagctgggactacaggcgcccaccaccacgcccgactaatttttgtagttttaatagagatggggtttcactgtgttagccaggatggtctcgatctcctgacctcgtgatccgcccacctcagcctctcaaagtgctgggattacgggcgtgagccaccgtgcccagccctgtgagtcatttttttaatgcaattgaatagaaccacagaaataaactcatgcatgcataaaaaacttgattcttggcagagtggaaattctctgtggagaaaggtaaattaatggttctgtgccaataagtctttcaaatggaaaaaataaagtgatcttagagacctaattttatagcatatatgaatattatatacagatttagaatgaaaatatgaatggcaacattttaaaactttagaagacaacagaaaatattctctcgaaggcttgggatacctaaaatatatatataaaaaaactcctgtgaatcaataaatgaaatacaagcaaatcagtaaaaaaaagtgtaaaaacatttataggcaattttttttctttctttaagatagagttttgctctgtcacccaggctggagtgagtggtgtgatctccgctcactgcaacttctgcctcctgggttcaattgattctcctgcctcagcctcctgagtagctggaattacaggtacgtgccaccgcgcctggctaatttttgtatttttagtagagacggggtttcgccatattggccagggtggcctcgaactcctgacctcaggagtgatccgcctgcctcggccttgctgggattacaagcgtaagccactgtgcctggcccatttataggcattttaacaggagactaataggatatgaaaagatgcttgttcttattgataggcaaattgtagataccattttcatactcaactatttgaaaatattttaaaagctaggcaaaaccaaagttgggaaggatgtggaactgtgagaactctcatctcctgttgttgggagagtcaactgatataaatactttggggagaaaatgttgtaatcgaataagtctgagaataataatactttatgacccagaaacctgccctaagtatgtacgccagagaaactcttgccaatatatgggaagtatgtacaaatgtctatattgcttataaaaacaaaacccagaaatactaaaatgtctactaacagtggaatggatgtataattgggcatctatacgtgtataattatacatatgttatagaatattaacaaatgtgtaattatacatatatagacatatatacagacatatatatacatacagaatgttgtaaggaattaaaaatgaaaaaaaaatccctccacacatcaacatagatgaacctccaaaaaataacattgaatataggaagcaggtcatagaaggctatatagctgtgaatccacttatataaagttcaaaatcaggcaaaactaaaatatattttaggaatacatttaaagatattaaaactcataaaaagcaaaagaatgattaactcaaaatacaagatgttggttttctctggagagaaaggaagagaggggcatagaggaacttgcctctaagagagtattagagtattaagtctgtttcttgttttttgtttgcttgtgtttttgagatggggtctcactctgtcacccaggctggagtgcagtggtacgatctcagctcactgcaacctctgcctcccaggctcaagcgatgctcccacctcagcttcccaagtggctgggactacaggtgtgccactacacccagctaatttttgtatttttagtagagatggggtttgccatgttacctaggctggccttgaactcctgggctcaagtaatccacaggcctcagccttccaaagtgctaggattacagatgtgagccaccgtgcctgactaagtctgtttcttaagccagatggtggtgggtacagtgatgtttgctttatttgaaaaaccgtacatgtatcttttatatatgcttatttatctgaaatatttcacagtaaaaatttttaaaagattctagagaggagaagtctgagaagatgaaggagtaggaagcgccagggatctgtctccctagctagacaacaattgcaccgtcagaatctgtaaacaggctgggcccagtggctcaggcctgtaatcccagcatttcaggaggccgaggtgggtggatcatctgaggtcaggagtttgagaccagcctggccaacatggtgaaaccctgcctctgctaaaaatacaaaattagctggcatggtagtgcacgcctataatcccaactacttgggaggctgaggcaggagaatcccttgaacctgggagggggaggtcgcagtgagccaagatcgcgccattgcactccagcctgagcaacaagagtgaaactgtctaaaaaaaaccagaatctgtaaacaaaacttttacatgcactggaaaaccaaaaaatttgtagggctcactttattgcaacattggcttggctttattgtggttgtctggaaccaaacccacaatatctctgaggtatgcctgtttgtttgtttatacacaaggtgtccctctgtggctcagtctggagtgcagtggcgctgtcgcaaccactgctcactgcagcctcgaccttctgggctcaagtgatcctcccacttcagcttcccaagcagctgggactacgggcacacaccaccacatctaactaatttttaaattttttgtagcgataaagtctccctatgtcgctcaggctagtctcaaactcctgggctcaagccatcctcccacttcagcctcccaaagtgctgggattacaggagtgagccaccacacccggcctcgcctgtgtatttaatatcactgaactgtacacttaaatatatgtgaatttcatgatatgcgtattttaccacaataaaaaattatgagaaaaaagctgttagagaacaacaacaacaacaaaaatagtagaggaagaaccttggcagttctaattattctagatagggcgatgacaggaacaacctcaggccgccacagagtaacaggtgacaataccttctaccctctccggctggttataacttattggaccatggagaattaattgagccataggcgaggctatgacagggctgatggaaaacgatgagtggacaaattatttattctttgtcaataatttgaactgggaaatattgagataagcaggtgacggtgggaactgaggctgaaagaaaacagaattacggagcccctgaggaggggaagcatgatgtataagtcacacataagtcaaattccaagggaacagaagccatttgtgagcagaagctacacggtagagaatgttcatagaaaggaaagcccattcgtgtaggaagagaaacggacagacttcaggcctggaggcatagagtgaaattccttcaactgcccaggcaacctttgctgaaggccttagatctgagcatccctgaaggttccgtctgagccccggggctacctggctcgggttcctgtttccttctccttgggaccccttcatggaccaatccatgacctgctccccagccagtaaggaaagttctctcttccttacatactaagcccaactactatacaaacagattgttctttccaaaatgttaaaactatctagagggctccggggctggcagagatgcagtaagcccacctcaactatctctcccattaacaacaactaaaaactccaggcagaatacaagaggccacactccctgagggtgctgaaaagttaactatagtgggtggattggggaaagaagtcaaaagttgaagaaatggctatgctttgtcaaatctcatagaaatgtacagcggaaagggtaaattttactgaagttaaaaattgtttttaaaattgcaggtgaaagaggaaaaagaatgggatacgggtccagaaaacctggattccacaggctcagctaattgttagttgcttatcttggtcacttaactaaatcttttttttaaaattttattattattatactttaagttttagggtacatgtgcacaacatgcaggtttgttacatatgtatacatgtgccatgttggtgtgctgcacccattaactcgtcatttagcattaggtatatctcctaatgctatccctccccctcccccaccccacaacagtccctggtgtgtgatgttccccttcctgtgtccgtgtgttctcattgttcaattcccacctatgagtgagaacatgtggtgtttgtttttttgtccttgtgatagtttgctgagaatgatggtttccagcttcatccatgtccctacaaaggacatgaactcatcattttttatggctgcatagtattccatggtgtatatgtgccacattttcttaatccagtctatcattgttggcatttgggttggttccaagtctttgtgaatagtgccgcagtaaacatacgactttactaaatcttaaaaccaaaagcctcccctaaactacctgaaggcaaacaagcaaagcaaggcaagtcaatttctattcagtttctaactgtgctattgaagacgttgatctaaggaaactgcctgagtagaagatacttcttccagtcctgatggattttagaagcctgccttctttcctatagcactgggggcctggacagcatggatagcagtggcttttcaaggggacctcgattggcttctgaaatcctttctgacgtcaggaagtgagaagacagccagccaagtctctccacaggcaggtagccattcataacctctccaagtcaagggccaataccccaaaagcttctccagccttggatgttcatccattcttacccctgaacagtgacttatactggagagcatagttgttaagagtttacattctggatttagactgcctaggtttcaatcccggatcgtcatttcctgttgctatgtggaatcctatgtctcaatttcttacagatgaggatatacacacagtaactgtcttatagtgttctggtgagaatttaatgagaaaatgcacccgaaatgcttactacagtgtctgacacgtgatgaacgatcaataaatgaactcaattattaataaccactgcataaaacacaaggcattcatttcagttacattcatctcattggccacttgggggagccatacagctgtaaaacgagcaggtttcaggaaaggtttattttagaaaagatttttgttgctgactattaagagagggagagttaagggttatctaattccactcgcttacttttacatacaaagaaacaaaggttcagagaggagaaatgatttgttcatagtcatacaaataactggtcgtgtgaaggctagagaccatctttcccaattcattgacaaattactgaataaaaatcaagtgtagttaaatgcctactagcttccaagcacagctagacttggtttgctgtgtgtctgtgtagaatttaaaataatcctgccgttctcaaattctctgctgatgaacttgtgttgtgcttttttattttgttgaggcctgtgcttaacaagtagcagggtaacagacacgggtaatacatatcatgacatttgttgccttgttgtatatagagttcttatgaaacacaggcaaacaggcattgtttttaagaaacttacttacacgttgaaataaggacacacacacacacgcacacgtacatactcggttgatgatcacattcgatttcaaagctttcagtggcacctgtaagagaaaaattctcaaatttatattggcaatctggatctctcccctgaacttctagcttatttatctaacttcttatgcaacatttccacttggaagcctatgagacatctcatgttctcgatatttaaagccaagttcctatcttctctggtacttgctcctgcaacagattttcccatttcaggtaatggcaactctgttatccgtttactcagccaaaacctttgtgtttccctaaacctctgctttctctcctactccacattacattcagcatcaaacatttggctctcgattcagaatgaatccaggatccacccacttcttgctgcctccaccgctcccaccaccatcttacgatggttactgcaacagcctcttaactggtctctcctgatctaaccttgtcttccctgcacagtggcagagtgacgctgttaaaaatcttaatagggccgggcacggtggctcatgcctgtagtaattccagcactttgggaggctgaggtgggcggatcacaaagtcaggagttcgagaccagcctggccaacatagtgaaaccctgtctctactaaaaatacaaaaaaaaaaaaaaaaaaaaattagtcaggtgtggtggcaggcgcctgtaatcccagctacttgggaagctgaggcaaggagaatcgcttgaacctggaaggtggaggttgcagtgagccgagatctccccactgtactccagcctgggcaaaagagtgagaccctgtcacacacacaaaaagaattctaataagccatcaagagactctgtctcaaaaagaaaaaaaaaatcttaatagtatcaggcagcctcctgctcaaaagcctgcaatggcatctgctatggtctgaatgtttgtgtgtcctccaaattcagatattaaaatcctaatctccaacataataatatgactaggtagaggctttaataggaaattaggttataagaatggagccctcataatgggattagtgcccttatcaaagagaccttgggaagatccctggccccttctgctgtgttaggacatggcaaaaagatggccatctacgagtcaggacatgggcctgttatacatgcggcctgttgttgactgaaacgttgctatgtgatccatgactgtatttcttttcttgtctagttgccttggctagaacttctggtaaaatattaagtagaaatggctagagtggacatccctggagggcagtggtgtgatctcggctcatgcgacctccgcctcccaggttcaagcagttctccctgcctcagcctcctgagtagctgggattacaggtgtgtgccaccacgcctggccaattttggtattttttagtagagacggggtttcaccatgttggccaggctggtcttgaactcctgacctcaggagatccgtccaacttggcctcccaaagtgctgggattacaggcatgagccaccacgcccggccaggagctgtgggtttttagatgtcctttattaggttgactttatccctagtttgtttagtatttttatcatgaaagcatttgattttgtcgtatgctttttctgtgttaaaagaaaaaactgtgtcttctacactcacgtttctgacaccaaatatgtggaggttttcctacactaagccattctccaatgctccaggtatcaacaggtgtcctacagttcaatgatgacactgattactcaaagttagcacagacccccacaggttaagggatcgcctccacaagactgtccccaattcagatgccagtctcaagcccaggttgtcactcagacgtctgaccaacgagctagaaattgagagttcccataatcccctcctcatgtttaataattttgatagaatgagtcacagaactaaggagggtgcttcacttacatttactggtttactagaaagcctactcaggaacagacaaatggaagaaatgcacagggtgaggtttgtgggaaggagtgtggagccactgtgccctctttatgaaggccaccctcccacacctttctgtgctcacttacctggaagctttccaaacctcatcatttaaagttttgttttgttttgttttttgagacagagtttctctctgtcgcccaggctgaagtacagtggcgggatctcggctcactgtgaactccgcctcctgggttcaagcgattctccttgcttcagcctgtagttgggactacaggcacgcaccaccatgcccagctaatttttgtatttttagtagagacggggttttgccatgttggccaggctggtctcaaactcctgacctcaggtgatctgcccacctcagcctcccaaagtgctgggattacaggcgtgagccactgcacccggcctcatggaggttttcttactattactttggtcttttgtgttactattaccacagctatgtttaaagtattcatctttgcctatttcacctaccatggaaaacatgggctgggtgccgtggctcacgcctgtaatcccagcactttgggaggccgaggcgggcggatcacctgaggtcaggagtttgagaccagcctggccaacatggcgaaacccgtctctactaaaaatacaaaaattagccagatgtggtggtgggcacctttaatcctagctacttgggaggctgaggcaggagaatcgcttcaacctgggaggcggaggttgcagtggtccaagatcatgccactgccctccagcctgggtgacagagcaagactctgtctcaaaaaaaaaaaaaaaaaaagtttatatggaggcttcatgacataggcatgattggttaattattggccactgaagatgaggtcaaattttcacccccacttccctccccagaggctacagttggggctaaaagttccaaccctctaatcacgtggttggttcctctagcaaccagctctgctcctccgagggtctcctgattagcatcaattcaggtatagttgaaaggggcttattataaatagcaaagctttatttttactcttatcactaaggaaattccaaggattttaggagctctgtgctaggaacaggagatgaaaaccaaatatacgttccttattatatcacaatatcacatgtatctatggagataatcatgtacttttgtcctatgttttattaatgtgatgtattatcctaattgaatttggatgctatgccaacttgcattgtggggataaatctcacttgatcatggtgtataataacttttatacattgctaggtttgatttgatagtactttttgggagggagatttttgtaagcaatttataaggtacattgatagattgctttcttttcctgtcatgttttgtctggttttggtattaggataacactgatctcattgaataaattgggaagtgtttcctattcctattttttggaagagtgtctctgtgtgtgtgtgtgtgtgtgtgtgtgtgtgtgtgtgtatttgtatttgtattcttgggtctataacatatagaaatataatatatttgacaataacagtacaaaggagatgggtgataataaaactgtattgatattaattctttaattatttggttgaattcagcagtgaaataaccttgtcataaacttttccttttgagaactttttttgatcactaattctatctctttacctgttataggtctactcgtatttaccatttctttttgtgtcagtttttatagcttgtatctttctaggagtttgtctatctcattgaaatgatcgaatttgttggcatacattgttcataatattcacctataatccattttattttggtaatgtcattggtaatgttgtttcttttattcctgactctactaattcaagtcttttctccttttttaaagtcagtctagttaaaggtttgtcaattttgttgaacttctaaagggcgaacttttgtctcattgatctttctctgctgttttttgtctttatttgatttgattgggctctaatatttattatatcttcgtatctgcttgctttgagtttggtttgatcttctttttctccttcttaaggtggaggcttagcttattgatctggtatttttcttctttatgaatataggcatttacagttacaatttccctttaagcctggctttagttatgtcacataagttttgatatgtcatgtttttgtttttattcaccctgaactattttctaatttgcatggtttctcctttgactcattagccatttaatagtgttgtttattttccgtgtacttaggcgttttctgtctccttatgttattgatgtctaatttcattccactgtgttcagaaaacatgctttatatgatttcaattttcttatatttaatgaagcgtgttttatgggctaccatatggtctattctggataatgttctatgtgcatttgtgaagaacatgtattctgctgtagctggatggaggagggttctatagatgtctaatgagtctagttgatttgtgtgttttggggctctgttaggtgcattgtaagtttataatggtaatattttccttttggatggatgctttcattattgtaaaatatcttgttttatctctagtaacatatttttttaaaggctattttatctgttattatgtggctactccagctctctcatggttgctattacgtggtgtatattttttcattcttttgtaaactatttgtatctttgaatctaaagtatgtctcctgtggttggatcatatagttatatcttgttttttaaaaatctaatctggcaatctctgtcttttgattgaattgcttaatccattttctaattatacacttattaatataacttaatttatgtctgatatttttcttatttttatttgagacagagtctcactttatcacccaggctggagtgcagtggtgcaatcttggcttactgcagccttgacctcccaggctcaagtgatcctcctgcctcaacccccaaagctgggactacaggtgcgtgccaccacacatggctaatttttgtatttttttgtagaggcagggtttcactgtgttgcccaggctggtctcaaactcctgagctcaagcagtctgcccacctcagcctcccaaagtgctaggaatacaagtgtgagccactgtgcctggccttatttttatgttttatttttgtgggtacatagttggtctatctacttatgggttacatgagatattttgatacaagcctgcaatgcatcataatcacatcagggtaaatggggtatccattacttcaagcatttattttttgtgttagaaacaatccaattatattcctttagttattaaaaacgtacctttaaattaattttgactatagtcaccttactgtgctagcaaatactaggccttatttattctatttttatacccagtaactgtgtctgatattttatgttctatatatttcatgtatttttccttcttatttctcatttactgttttgtttttcattgagtgaatattttctattgtaacatgttaatttttaactgacttttaatctataattttgtgatattttctatattttgtatctatatttttgagatattttcttaatgcttgctctcatgctacaatataaatcttaaattatcaaaacctacttcagatttctgctcttttaattccagtgagatatagaaatattacgcctataaagttccactccctactcactatttggtgctattgttacatatagtatgtttatgtatgctacaaacctatcaatacattgttatagttatgattttctataaagtatgtcttttagagaagctaagagaatggaaaagagcaagtatatatttacaaagtttatattagtcctcttatttaaatttctgattctcttcattttccctgtggattcaacttactatatggtgctatttccttcctacaatacagttttattgttaccatctcctttgtactactattgtcaaatatattacatttctatgtgttacaggcccaacaatacaaatacgcacacacacgtagacacacagacatgtgaacacaatgatatgcaattgttattaagtagttaagagaataaagaatacatatacacatatactgtattttatatttacctgcataattacctttagcagagctttttgttttctcttgtgaatttgaattattattttgtgtcattcacaagaacctcctttataatttcttgtaaggtgggtctgctagcaatacattctctcagtttttgtttatcttggaatgctttaatctctctcttgcttttgaaacatagttttgctggatataatacttttagttgacagtttctgttttcagtactttgaatatggccagctcactgccttctggtctccgttgtttctgaaagaagtcagctattaatcttattggaattcctttgtatgcaaggaattattttttctcttgcaggtttcctaattttgtctttgtctttgaacatgttgactattatgtatctttgtgtttatcccacttggagtttggtaagcttcttgtaagcatataataatttaaaaaacatgtttgggaagttttcagctattatttcttcaaattttttttctggatctctcactcttttctttccttctggtactatcactaggcatatgttagtgtgcataatgtctcatattttctccaaggatttatttatttttccctagcctctttttccctcttttgatttgattctttcttctgacagctgaaatctacagttgagcccctctagtgaatttttcattttggtttttctagtttttaattccaaaatttccattttgttccttattaaattctaccttaattgctatttttgatttaatgtgacgttatcatatcttcttttaatcatttaagcactgtttcatttagttattgaacatatttatagtcgcttgtttaaaatgtgtatctaccaagtcaacatctggaactccacttaaaggcagtttcttttgtttgcttttattcctgtgaatggatcacactttcttacatctttgaaaatcttatttgttctttctttttgaacaccaggcatttcagataatatattgtagcaactctgaatactgatttcctgtctacccccacccccacctcaggaagggctttgtggtgttgttatttgatagtttatttgtttagtgactttgttgcactagtttagtgaagtttatttttcatgcagtatgaaacctttaatgtttttcctcaaatggcacagacttgggcattctcatttttagggatgacagtgattttaggctctccttgactttctctttttctgatattcctgtaagtctctggctggtctgcctctattgttctctaccatggctagctgatcattctattgtttttaacaatgcccctgggcatacattgctctacagtctgatccaattaaggtcaagccctggagggatgagtttttgaggccagtctttgaggcttgtatttctcccacgatggctcttcttagctgtctctctgtcttccctggttctctctggtaaactagctgatctactattttgcttatttattgctattctggagctaccagcttcctctaagtgctcaccaacaaaatccttcttattaatgatgcaaatgcccttaggcctgaacttccatacggtctgctgaagaaaaaatcaatctcctctgacagaggtatggagttcagctctctgttcttatggcctgccttacccactgggcagaatctttgcatcattgctctggagctggggttggggattgtcttagtccatttgtgctgctataacagaataccacagactgggcaatttataaaaaccagaaatctatttcatagtgctggaggctgggaagtccaaaatcaaggtgccagcaggttaggtgtggcgagggtccagtttttgcttccaagatggcacattgaacactgcatcctctagaggggaggagtgctgttcctcacatggcagaagagtagaagagagacagagagagaatccactcccacaagtcctttttatagtgacattagtccactcactcgggcaaagtcctcatgacctatagacctcatataaggcccacctcccaacactgttgcattggggattaagtttctaacacataaattttgggggacactgtcaaaccatagcagggcaatggtccacttatcttggtgcgatacccctgctttatgagcatagctctgggcatgggtggtaatctctggttttcttggctcatctccttcactacagagtatggactccataagtgagctagagtaagggcgatctgaaccaagtatttttggcctgctgtgtctagctttcaccctatacatgcgggctggatggaggaaggaagccccagatctctgggtattatcctccttcaatagagtttccaaaacatggagctgggggagagggatgagaactgctggcaatatgcttctcccagggggaactgtacccctggactgagagctgggggagaaagagttctgttcctggtggcatctgcccagagttgagcttttgtcacactgagttgcagggggagtggcctctaaagagttgagttgcagctaggccgggcacggtggctcacgcctgtaatcctagcactttgggaggctgaggcaggcggatcacgaggtcaggagatggagactatcctggctaacacggtgaaaccccgtctctactaaaaaatacaaaaaaaattagccgggtgtggtagcgggcatccgggtcccagctgctcgggaggccgaggcaggagaatggcgcgaacctgggaggcggagtttgcagtgagccgagatcgtgccactgcactccagcctgggcgacagagcgagactccgtctcaaaaaaaaaaagaaaaagagttgagttgcagctaaaataccagattctcactgttttactgatatttagtagatttttttctaaagaaatgtttctccatttgtttttagtattatctctggagactttagttggttgttttataaatttcacccattatggttgtttcgttgggaggaggtcctgtggagtttctcagattgccatttcagagtggttcttgagtgctgttatgtttatgtgctgatcttgtgtcaggaaatcttgctgcatcatctcattcattcattcattcattcattcattttctcattaattcaacaaacattcattagtttgattgttttgagatttctaagtaaatgaattcaaagaattgcaacttttacaatcattctgggccagtcacggtggctcatgcctgtaatcccagcactttgggaggccgaggtgggcagatcacttgaggccaggagttcaagaccagcctggccaacatggcgaaaccccatctttactaaaaatataaaaaatacctaggtatggtggtacaagcctataatcccagctgcttgggaggctgaggcccaagaatcccttgaacccaggaggcagaggttgtagtgaagcagagatcatgccactgcactccagcctgagcgacagagagagaccctgtctcaaaaaaataaaaataaataaataaaaaataattctgtcttctggaagctgagatttttaaacaatttaaaaaaattatgtctttaaataattgcaagttttctcacttttttctatcttttactttttcttttttttttattttaatgaattagacaagacctttcaaagcttggcaaaagtagtgattacaacaagtatatctgctttcttttctatcttctaacatgtccattatgtgtgtttgctatagggtttttgtaggtaggctttatcaatttaggaacctcttttatattcctgttttataagagttttaaatgagaatgtattgacttataaaaatgctttccattgtctactaagaaaatcttctgagttttctttgttactttatctttgtgaataagatttatagatgttctaatgttgaatcatcccctaatatctgaggtaaagtctgattatgatggcttattttaaaatatatgttggattttagtagtagtcaatattttatttaggactctcatttatattcataagtaaaattggcctataatcctctttctttgattttcccctgtatggttttactatcaaagttatactttttttcatacgagtgagacagctttccttctttttctgttttctttgtgtgtgtgtgtgtgtgtatgtgtgtgtgtgtggcacaacttgtttgacataaagattagtttttatttgaaagtttggttgcaaacctgtaaaacctagacctggctttgtgtggatatgaggtttagagagaagtctttttattacttcctaaatttcttaagcattactggtataaatacattttctattcatttgtattaattttttttgcattttgtacttttaaaattgttcattcattgcttctgggttttgacatttgttggtgtttacttgttcataatattcctttaaattattaaaacatcctttgtgtctatagttatttctccatttatattctctattgtgtttatttacaccttcttttttgtcccttgatcattctttccaagttttatctttatgagccttttctataaaccaacttcttgttttgttagttgtttataattttctttgtcctgtgctttgttgacctttacctttattattcctgttctccttgtttttttaaggtgttgaagaatagtctgtcattaacacacagccaatgaggtcatcagactctttcatacatggacaggttttgagatgtgccccttgtggaagaaaaccacagatgttttagagcactgaattgtaagcatgcttagagatgatttattccattaagggcaaatatttaatgtgctcaatttgaatgcatggttcacgttcatttccccccgcactgaggtcagatgcatcctggtattcccaatactgttagagacggcactgcaggtgaggattctttgccatccatagttccccctacttaaagtgtggcccacgttgcaatcacctgggagttttttttagagatgcagaatattgggccctaggccaggcctactaaatcagaatctatattttaacatcttcagatgaatcattaggcattgaagtttgagaaacacttggtctaacaccattattttgcaggtgagaaaactaagagcctcagaggtaaggtaatctacccaagactatgtagaagaaggaggttttcatagcaaaattaagcaggggaagagagggaaagaaagagaatgagagaaagggagagtaagaaagccaagagacagatgaatgcaatggaaaatgagaaacatgagtgaggagaaggcagatggggagtcagtcttcccccaggatacagttcatctgaggccaacttctgggcatgctgagtagccagaagttttattcaccataatagaagcttttctcagtgtccttggtatcaggcttgaatgactgtcggcaaacacactcacatttcaataaaactcaagttctttttctggcagtggaagtagcagtaaaaaaggctaggaaatgaaaacatctgtcacatggcttttgaggtgccaggtgtcacagccctagggccaactgtccttttgcaacatggcttccttggacctcctacctgtcttgtaggcctctgccctgggctgtggatagcctgctacctcaaggatgcagtcataaatctgcagtgaccctaccctgtctgttcacagagctcctttccaggaagaccaggaattatttattgcagcccatagaattctctgtaaggttttacccccagatgcaggagatgcatgttctgtttctgtttgacatcccatgtcagaactgagccctggaagaggagtaagtaattcagcattatacacagagagtaaagttatgtggttatatatcaacacaaggcactggaagtccttcgaaatcaggagagtataattttagaatgaacgtaatgaaaatgtcaaaggagatccatctttctcttctacctctaagatgtgctaaaaataattgagacaattttccacgtgtggatgcatgccttataccacagttgccgcctggggaggacactgagctgggagaacagacctctaggtcaccagccctgatctctttggactttcaagaactgaatgcccagctgcttctcaaatgtcttctcaagactgtcctgacaatagcacctcaaactcaacatgttagaaactgaactcattatttttccttccagatttcttcttgattttatctttccttttgtgcaatgcaccaaagcaagatcgtctcaatttcatagccaggttattggcatcacgcagttccctgttgctcaagctccaacaagttgctatccttgacttctcccattccactacttctctatccaaagaatgggtggttcctgtcaattctgcttcccgagaggtcctcagatccatcttcccagtctggctgcagctgttctgacccaggtcattgtttttcactgtattattgtgtattgtgatgacctccaaaggttagtctctgtccacaccatcaccaggttcatcttctgagagcatcaacacagcccgtttcttgcctccttagaggccttctctctcagtcagaatcgagaactcgcttagatacttgcacacgcatttttataacagcacaattcgcagttgcaaaaatatggaaccaacccaaatgcccatcaatcaatgagtggataaagaaactgtgttttatatatatatgaaggaatactactcagccataaaaaggaattaattaatagcatttgcagcaacctggatgggattggagactgttattcgaagtgaagtaactcaggaatggaaaaccaaacatctatgttctcacttataagtgggagctaaactatgaggatgcaaatgtataagaatgacacagtagacttgggggactcatggggaaagggtgggaagcaggtgagggataaaagactacaaattctgcttggtgtatttgtacagtgtatactccttggatgatagatgcacgaaaatctcacaaattaccactaaagaacttactcatgtaacaaaataccacctgttccccaaaaacctatggaaatagaaaaaatcttttaaaaagaactcacttagaagcatctcctgtcttccctgtgagctggccccatccaccttctccatgctgtctgtcaccatgcccctccacacagctttggccacgccagcctgcctgttcttccttcatacactcacaccttagatctttgtgtattcccattgccaaggccgggaatgtccttccctgcctcctacatatcaaaaaaacaactgtttggatagtgctactctttcctcctcagctctctggggataatgtatcctctgccttttgatgaaatcttgggtgtttgagtctgccagctcattcttcagaactaaaaagtcctccagtcattttttttctttaccacacaataattcttattttagtaattaatatatccagcccaaggcaacgtttaaggaaaaaaaggcacccaactttattcaaggtaaaatgttttgtcccctttcactccagctatgcctattgtcgaagttatagtgtgtgtggatgtgtgtatatgtgtatgtatgtatgtgtgtatgtgtgtatgtgtgtttatatatgcaggtatgtatgcctaggtatgtgtgtgtaggtgtgtatgtgtatttatgtgtatgagtttatgtgtaggtgtatgtgtgtttgtgtgtctgtgtatgtgtgcaagcatgtgtatactatgtgtgtgcatgcatgtgtatgtgtgtatgtgtgcatgcatgtgtatgtgtgtatgtgtgcatgcatgtgtacatgtgcacgtgtgcatgtgcatacatgtgcatgttcatgcatgtgtgtgtgtatggtatatgagtgtgcgtgtgcatgtctgcactgggtcagatggggagtcggaagtgagtgggaagcttcttttctgtttcccgtcttgtgctttccttcctcctgccctgccaccagcttattagctgaggttgctgaccttccaggtcagaatgggggtaagggaatggggataggtgagggccaggagaggtctagcagaactggtatttacataaatgtgagttgactacttctgaccacagcaaattagtagatgcaaagctgcctccatctgttggagtacatttgtgggccctttggggtcttcactgggaatatttgaccaagttgcttatagtatatgccatttctgttctctgctgctgttcttaggaatccaggtctagcgttccaccccaggctggggtcctcattcttccccaggcagatttcaggggcagtatttgagtgttttacaaatgtccagtctctcctatggcccatacctgatccattagaaagagttgtgcatctttgccactgatgtgggtggacatgtctaccacttctgactcatagtgacagcttctcctatttagaaagagacaccattgtagggaggctgaaagttcctgagaacagtccattgtgctagccaaactccaggatgcaagggaagcatccagaatccagaatggtgcctggaattcttttttttttttttttttttgagatggagtctcactctatcgcccaggctagagtgcagtggcgcgatctcagctcactgcaagctccgcctcctgggttcacgccattctcttgcctcagcctcccgagtagctgggactacaggcgcctgccaccacgcctggctaattttttatagttttagtagagctggggtttcactgtgttggccaggatggtctcgatctcctgacctcgtgattcgcccgcctcggcctcccaaagtgctgggattacaggtgtgagccactgcgcccggccggtgcctggaattcttactaggcttaggtgaagagaaaatatccctccaacaagggacctcacgaccccatctcaaagaccatttctccaacttttccaactttaactctagtttttgggcaggtcaaggtgggctgtgggccacaaaatcattctattacttcctttgtaggtcctgcagagttggtcaaagggaaagcctgtgtttgctgtttcggagcacctgctgaaactgaccctgcattgatgtctgtctacattgtcattcaagattttgctcaagtgtctcctccttagaggacagtgaggcttctatcctcctcaagtgtgaatgatgatagtgaggtaggaggtgggactcaactcaggaggtgggacctgacgccggaggtggggcttgaaaactagaccaaactgaggactagctaaaacagggacagggtggaagcaccttttcataagacacgcccaccagtgtgccatgacaatttaccattgcatggcaatacttgaaagttaccgtccctttccagggcaacgacctgatggcctgaagtcaccaccttttctagaaatttctccataatccactcctgaatttgcatataactaaaggtgaatataaataggactgcaggccaggtgcggtggcttatacctataatcccagcactttgggaggctgaggcgggtggatcacttgaggtcaggagtttaagaccagcgtggccaacacagtgaaaccccatctctactaaaaatgcaaatattagctaggcatggtggcaggtgcctgtaatttcagctacttgggagggtgaggcaggagaattggttgaacccgggagacggaggttgtggtgagcagagatcgcagcattgcatcccagcctgggtgacagagtgagactctgtctcacaaaaaataaataaataaataaataaataaataaataaataaataaaaatatgactgcaaaactgcctctgagctgctaacccctcacactgcctaaggagtagccctgctctgcaagagcagtgaaggagctgtaacactgctacctcaataaagcttctaccactggcttactcttaaattttttcctgagtgaagccaagaagtctcctgggctaagccccaatttggagcttgcttgccctgcatcagtggcagagggtttcctggcatgaaccagaagttactttttcctaaaaatgcctgggaactgaagaggggtgcctttgaccagtggagcttcagctgtcttttaaaaattattttccaggcccggcgcggtggctcacgcctgtaatcccagcactttgggaggctgaggtgggcagatcactaggtcagaagttcgagaccaggctgaccaatgtggtgaaaccctgtctctactaaaaataaaaaaaattagccaggcgtggtggcaggtgcctgtaatcccagctactcaggaggctgaggcaggagaattgcttgaacccacgaggcgggggttgcagtgagctgagatcatgccactgcactcctgcctgggcaacagaacgagactccatctcaaaaaaaaaaaaaaaaaaaaaaaaaaaatatatatatatatatatgtatttgccaatatctagaaagatacacatgtgcaaggaatacacacccaggaatgatctgttcccacatctgtgtccttccagcttcgctctgccttctgagcactagctgtctctgaaggaacagggctgtcaccctggaatattagagcaagatgggggatttgtttgggatctgagccttatcttggtgcagggagagccagataaaagtgacccagttagtcattcaagaaatatttgtgcacctaatatgccaggcccttggctaagtactggggatttaatgattaaaggaaaataaaaagaaatagttcctaccttcatggaaggtgggatccccaaataatggaaagctactatcatttgtaatatttttccagaccagagctagttggtgacctggaagccaaatccagatcattgatgtgcatttttgcacattattttagaatattctaaaataagctgcattggttgatgacatttaataattgagagattttacacaacaaaatctgtttttctggcttctcccgaaaatcagcagatctgacggccctgggttctgattttcccagagcaacaacctgctggagttgattaccagctaccttttagaggaagcatgcacgtgccggtttgcctcagtccccaccactcccttttgtacattcctcagcctgcttcgctcatttaggttaccggcctgcccctgtagaggtttgatttttggatctggctctgatctagtaattttcaagttttatttttttttcaggaaaatgcctttacaaaaaaacaaaaagcaaaattttatgcaaacccaaatatatcaaatacttgaaaccatagctgctttcgttggaggaaaagagagcagggaacctcatcttccctcatgtccactgaggggagtcttggggctctgaagtatgtattaatagtttggaatcccttgccccttgttcaaactctgaccctgtaaccacttgctgtaacaatctataaccgtagtagcaaccaatagaccttcaggtttgccctgttccctttgctacctggagccccgtctagctcacaccgccctctttgctctgatgggcttaacaacctgtatgcctgggtctgagtggcctcgaggctgatgtggtcagagtgggacttgccagaaagcatcttcacagagggctccactgctctttgtgcctcctttagcatttcagcaaactattggatttcactgtgacttcagcccctgtctgatgagtttaaacaaatgaggcaaatatgaatgaaatcctcacctataataacaacaattcaagaggagggcccttggtctttgcatatatacaatagtccccaacttcttgtttcctaaatatttgcaactctgtatgccaaagggtgagcccacaagtgaaggacgtgagcttggagggtaagaaaattgtcttcctttgcatttaagatgttttgagactaggccaacatgaggccctgccttaggtttgggcttggacaattctgcctctgtcttcctaaagacttctattttagaaggaaaagttgctctttttcttggtctgtcccatatgtgtgtcttgtcagaaggtcagatgctaggtcaggggtcttcatgtcctcactttccccccagtttgtcttagagactgtgggaattcaaaatttgatgaccactttggaaaacagtttggcagtttcttgtaaagttaaacattttcctaccttatgaatagatgtttactcaagtgaaaagaaaacatgctcactcaaggggctgtacctcagtgttcacagcagcttttctcataattgccaaaacctacaataatccaggtgcttatcagaatgtgaatggataagcaattgtggtatatccataccatggaataccactcagcagtaaaaatgaacaaaccttgaaacatgcaaaaacatggatggatctcaaaggcattatgctaaggaaagaagccaggtacaaaagactaaatcctgtatgattttacttcatgtgacattcttaaaaaaacaggcaaagctatggtaacagaaagcaagcagataattagctgtctggagttcaggctgggggaagaggattgactacaaaagggcatgagggaatgttttgggataaagttttgtgttttagcttttgtatttaggtctgtggtttattatgagttaaattttgcgtatagtgtgaggtaaggattgaagtaggttttttttggtttttgttttgttttgttttgttttgtatgtagatatctgttgttccaatacatttgttgaaaatgttctcactttcccatcaaattctttttgcatcttcctcaaaaatcaattggccatatgtatgtctgtggattgtaattatttttcaaatgatagattttactttaaatttgcaattaaaaaatctgactttccctctagctgtagactctgcctttgacatgactgcttcctaatagtaataactggtgtcataatagctaacatttactgaggacctaccacctacctagcactatttcaaaacttttacatctattaactaacataaccctcacaactaccctgtgaaatatgttctattatttccattttacagaggaaagaacagctctgtaacgttaaataatttgtgcaagttccaaagctaaaataacaaagctgggatttgatccaggcagtcaaactctcacagaccgcttaaattcagccctgcaactgtctctccgtctctccccagctcctggcgtatagtaagtgctcaacaagcgttaatggagtcagtaaatagaataataatttataacaccaacttgtgattatttacgtgtttatcattgcaacttgatggcgtgctcctttgttacagaaggaaatgtaccgttgactaattctaaaacatttagtgaggcttagtaatgtgttaaacagtgtgccagatgggagaaacacaaagatgaaaacacggacaaatgattaaatgaatgaacaaacacattggcttaacctggtagattctgttcccaaaagggttgacttaacttacaaaactatccctaggatgtagatttggagtgggagcccgactgcttgctgtagctccaactttctgatcttcagttggatcatccaaggcatagggctaataaaacctgccctgcatacctcttagggttattgtgaagtcaaaataatactgcccataaaagaatttagtaaactgtacagagctaagcagatgtcagaggccgtcaccttgactttaaacttgttccaggtggtgcaaggccaaaaaaatatgtgatctgctcatgtgtatgttttgcagcctctttctcagggcagcagagcgggtgcagattgcaaatccaccaatggtgcacaagaaaccagaaggtaggagctgactccagcctggaaaatgttcaacagattctgtgctgctcatgaggggcactgacagtttattctcacatcctggcttctggcctgaatagaatccccacagattggagtactgggtgtaagcatgtgttaggtgcctgtgtgcctgctcttgcacggcagggctgcacagagaaaagccctgatgcaggagatggacagagaagactggacagaggccttaaagtcctttggatgttggggatgagcgttaactttgtcagtatcaggaagctgggaacttctctctcgataagaaagaatagaaaaagaaaatctatctttttattcaattcaattcaataaatgtttattgaacacctactgtatgcctggcattgtattaagtactgtggggaccgtaaagatgaacaagatcctaaccatgtcctctgggagcaggtgtgccctcaataaaccgaggtacgaagggacatgacttgtaaagaagtcaacccactgaaggttgtcctctgagcctcatgggctctcttggttttggctgcatctggatttccacacaaagctcatctccttccttggcctccacttgaaaattaaacactctaagcatgcattgctgagtgtcagtgagcatgtctgatgctttactggagctgtggcatgtgatggtggaggggtaaaattctcaatacttagagtttacccaaaacatgccaattccacagtttctccctaatctcccctcccagccccagccatgaggcctgaacctcttccatcctcccccaggcctctcccttactcctgccattttcctttggcagattcatttccttccatagaaaccctgggatccaaacaggactgggaggttctttctccttccatagacccctcatcaataccaagtgtcttctttaccaagaagctctttccctgcaaaggaacgctaagagaagcacttggaaaatatacacagacataggatttaccagttgctatggctgtgtacccgcaaattcacatgttgaaacctaacccccaatgtgatggtattaggaggtgtggcttttgggaggtattaggtcatgagagcagagccatcatggatggggttagtgcctttataaaacagaccccagaggactcccttgcctcttctgccatgtgaggactcagcaggaaggcatcacctggcaatcaggaaacaggccctccccagacaataaatctgccagcaacttgacgttggacttcccagcctccagaactgtgagaaagaaatttctattgtttatcagccactcaatttatggtattttgtgatagcagcttgaatggactaagacatgaattacttactagttttttttgattgaggtaaaataggcatacataacacaaaattcaacattttacccattttaatgtgtgtaattcagtggcttttagtacattcaaaatgttgtgcatcagtatctaattccagaacaattaatttcatcacccccaaaagaaaccctgtacctgttaagcattcactcctcatttactgctcccccagccaccggtagttatttgtgttgacaaaactggttccatttacatggctctatggtttgattttctcacttgagacatcagaaacatccctttcagtttaaaagtcgatttttattttcatggctgcaatgcaattttgtgacttgcctataccacaactagtagacattttcctgtttataatcagttgtttccctgtctgagcctcttcagtgatcgttgtttgcatgttctcaggttctgctactcagttttttatcttattttgttatttttttaatcactctgtcacccaggctggagtgcagtgatgtgatcatagctcactgcagcctcaaactcctgggcttgatctatcatcccacctcagcctcccaagtagctaggactacaggtgtgcaccaccacatctggctaacttaaaaaaattgtaaagatgaggtctccctttgctgtctgggctggtcttgaactcctagcctcaagcaatcctcctgccttggcctcccaaaatgctggtattacaggcatgagccacatgtctggcttgctactattagttgttgttgttgttatttttctttgagatagggtcttgctctgttgcccaggctggagagcagtagtatgatcatggctcgctgcagtcttgacctccctgggctcaagtgaccgcccacctcagcctcctaagtagctgggactacaggcgtgcatcaccacacctcgctaatttttgtattttttgtagagatggagttttgccatgtttccccagctggtcttgaactgctggcctcaagtgatcctcctgcctcagcctcccaaagtgctgggattacaggcggaagccaccgcagccagccctatactaccagtttttaaaagttgagtccccaaatgaaactgctttgccaagggcctaagaatttttaaatgtaatagatattagaatattactttccctaaaggttcgtacagtatttttttttgtatcaatgacattttattctctgttcagaaagaccttgcacatgactccagtgtcacacatcctttagtctctgcctttgtatgatcttcactttcatatatttgaggagatctgggcccctaatgcacttgaagccgggataaacaagaagggtttgcccccagggacctgttccctatgctctgggcttttctgtgtactctcctggggcagatgagattggcaaagactgtctgttgattttctaacttttagcaggttcaactgtggtggtcctttctgttcttcagtaacaatcaatgacacagcaggctggcagaagtgttttttgttttttttttttgacggagttctgctctgtcaccaggctggatggagtgcagtggtgcgatctcggctcactgcaacctctgcctcctgcgttcaaacgattctgctgcctcagcctcctgagtagctgggattacaggcacccaccaccacgcccagctaatttttgtatttttaatagagacagggtttcaccatgttggtcaggatgatcttgatctcttgaccttgtgatccgcccacctcagcctcccatttttttctttttctttctttttttttttttttttagtaagcattttcttttagagcagctttagatttacagaaaaattgtgatgatagtgcagggagttcccatatcccccacacccagttcccccattaggaacatcttacacaggtgtggtacatgcgttacaatgaatgaactgctactgatacgttactattagccaaggtccatcctctactcagatttcctcagcttttatctaatgccccttttctgtttccggttcccatccaggataccgtattagattgagttgctttgtcttcttaggttcctcttggctgagacagtttgtcagattttccttgcttcaaatgaccatcatatagcactttaaaagatgagatttcagctgggcacggtggctcatacctgtaatcccagcactttggcaggctgaggtgggcggatcacctgaggttgggagttcaagaccagcctgaccaacatggagaaaccccatctctactaaaaatacaaaattagccgagtgtggtggcgcatgcctgtaatcccagctactcgggaagctgaggcaggagaatcacttgaacccaggaggcagaggttgcggtgagcggagatcacgccattgcactccagcctgggcaataaaagcaaaactctgtctcaaaaaaaaaaaagaagagaagatttcttctttatcattaaaggcattatataaagaccagcgatagatgaattctgcctgggatgatgtgagaaggcttcttggaaaatgcatgatttgaactgggccttaaagggtggcttggtaggtagagatgctgcagaaagcttctgggcagaagcgattatgtgagtaaaaccacagccatgggaatgtgttgatgcgctctgggagtgggaattagcgcagcaggggtagggcatgtgggggccctaagaaatgcatttagtgcagtaagtgggccggtcagggcacgcagacatggctagtttaggaagagctctcacctgctttccctatttctttcttttcttttctttttctttttttttttttagacggagtttcgctcttgttgcccaggccggagtgcagtggcacgatctcttctcactgcaatctctgcctcctgggttcaagtgattctcctgcctcagcctcctgaatagctgggattacaggcgcgcatcaccacgcctggctaattttggtatttttagtagagacggggtttcaccatgttggccaggctcgtcttgaactcctgaccttaagtgatccacctgcctcagcctcccaaagtgctgggattacaggtgtgagccactgcacccgaccttccctacttctttcttacctctttttctagcatgacaaaagaaatagcttatcagagaaagaagagacccctgcccaacacggcccgagggtggtgtctgtcggagggacttgacacacagatgtaatctgaccttgccagtctcaggaatcaagctcccagtgtgtctctctctattattgcagatgtccgtagcctttgtggggttaataagggacaccatttctaaactattttagagattactttacaaagtcataaaaacgcacaattctaccaacattatattacggttgctaaaaatatcacatgaccattggttagctcacagcaatagatatcccacagactaatttaatcactggcaggaggccacgcagtctccagacaggatcagaatcaaactgagggctgctaaatttagaaatataaatttgggtttgtttagaatgatttgaaaactgaaagaacacataagccaggacgcaagtgtggttgtctgctccgaaggcagagcctttgtggcattccttgatcgccttgcactttggtctgtcctgcagacccaaccctgcttttggcttttcattggaaatattaggtcagggacccacgtttgaaagtcagagcagacctttgatgtcgtctgggctggacctacattcttcttctggatatgataccattgtcattggcttactgtgaggcctctatgacagattgattttagggtgactataacaattctcctgttcctctctttgacgttgggtcaatgctacctacttttcccaccctgatgtaagaatgagtgtctgcagagtcgccttgaggtttcatctggggccaggaggctaacgagtcccgtagggaatgactgaaagggaaagatggataaagaaaagttgtgccctacacactcctcttgttcaatgtttactgtgaagaggatttttttttttttttttttgagaaggagtctcactctgtcacccaggctggagtgcagtggcgcgatctcggctcactgtaagctctgcctcccgggttcatgccattctcctgcctcagcctcccgagtagctgggactacaggcgcccaccatcatgcccggccattttttttttgtattttttagtagagacgggacttcactgtgttagccaggatggtctctatctcctgtcctcgtgatctgcccgccttggcctcccaaagtgctgggattacaggtgtgagccactgcacccggcagtgaagacgaccttaagacacaaatgtccttagccacaggaactctgggtaggtggggattcaagtgggtgatggccaggtatggaaaggggagtggtgaaactcactcatgttactatttgggatgttgtccctaaaatcactgaggaaatcagcatggttgagtcaaagggcccttgagtacatatcagcataaccagcccgcttatccagccccaagtacttctcatgtggccttcagggtatctgtgactcccctcttccttgctcaggatgcaggaggaagaggtctcacccattgtcactacttcctattacatatccctcttgctgtccttcaaacatgccaaatgcttccatgtccaggcttttgtctttacaccctgcctggaatgctcttccagcagatacttccatgagcttcttctctctttatttaggggtcagttcaaatgtcacctcctccaagatgtcttcctggaagtcatatctacaacggctcttttatagccccattctctcttcctgctttatcttcttagatataacccattactgtgtattatatatcacatcatattgtggatatatatacacacacactatatatatatgatgtgatattgtatatatacataaattaaaaaatatatatatatattttttagagatgaggtctccctctgtcaccaaggctggagtgcagtggcatgatctcagctcactgcagccttgaactatcgggctcaagcagtcctcttgctgggaccacaggcacacattatcattcttggtgaatttttaaaattttattagagacggggtcttgctgtgttgctcaggctaaatattatacacttatttgcttattatctatttcctccacacaaatgcacactacataaggatgctcaataaacagttgttgaatgaataaatgagtgaatgagtgatgataatgtccattccttatacttggataaaactttactacaaatatggctgtacatttgcatgcaaattcaatcaggaattcacatcctcatttttttaatatgttgcttatttctcccttggtattgtaaccacccttgtaaatgtgtaattaccgactgagatacaggctctgaagggaggccagatagaccacggcctcccagagagagtatcctttgagctgggaactgaacggcagtagtctattgactgggtgaagtgcagcgaagaacactgcagagaaaacggtatacacactgtagttcctcaatgttatggcacatatttcttcagctcttcacctttctggctttggaatagccttagaatcaatagccatctcacgatcacttttggtcaggtggcagccgtgacatattgtcattgcctggactcacgagatctctactgttgttggtgatggcatggctggacaacagaagagccatctgagggaggcttatcagtctcaattgccttctgaaaaactcccactgacaccttctggttaggccaagaaagtgccaacatcaaaaatttgagaatgcctgtccaggccttggggaaaaaaaaaatctagaaggcaatagagttgctgggaactgaagataccgagtcatcaacactcttgagggctcagagaaagaaagctcggaggatgtgaaataacacagacatcgatgcctcagagctgaaagcgattcagaagtgccagactctcaacatgaggagattttggaaataccgtaatcaatgagttcagcatgtattttcatttttatgtaggcacaagagcaataaacgattcagtcctatgtctaaagaaggctacaagaactcctttgagaagcataaaataacaattctgagcattaatcattaagaaagcatagtgtcagaatttcatcggcagagatttttatttcttaaagttacataaagtagcagtacatcttggaattggtgagatcttggattggatggaatacagtaagattggtttgaggatctgagggttgggttggacagtaccaggggacgtgggcaagcgggtggtgaggagcacccatgttggtcagaggaggctgatcagtggcccgtcacggtgtgccctgagaagggatagcttcttcgagattgaactaatgggctattttctgcaacaccaatgcattctcatattaatagccttcagcacagtttaagtgtaagaattactttgctactgacattgagaagaaacatatggcagatagacacaatactcattctccaaatcaccccaaataaatagaaaaatcccaaaggcacccttagggatatatagagaagagaaaaggcaaggctgaattaacatctacaggccaggaagaggaggtcagatgtctgtggaaatactgtttagctctccaggtcattcagtatttgcaagccgtaaatgaaattgtccaaatttgtttcctcatgaaaatgtcagcttgagagcttaaagtgagtaattcttttcttatggtttgaaaaaagaagcccactttattttgttgccctcaagacaaaagaggctttttgttcttgttccatgtttccagtttgctggtacttttcagattttcttacatagagtgatgatataaattttcaggtggaagaaactagatgctgacatgtttgtttggtttaagccagagctgtcatcaccaatctgccgggcctggagggatggggttcttggttccccctttccctgttccccaggtgagatctgtgacccacagatgactctttttttgcaagacatgttaataggatggtgcataaaagggatatggctacataattcttgttaataaatgtcctgtttagttacctcatgttaattaatctcaaagcaaagacagctgtcagattttgtttgggttcaagcctgaaaataacttgtagcttttaaaaaatacctagtttttcttttcctctttcttcttctccctctcctcctcctcttcttctcttcgtctcctcctcctcctccctttcctccccttccttttcttcctcttccttcttcctctcttccccttcctcttccttcttcctctcttccccttcatcctcctcttcctccccccactcttaatgtttctttttcaaagaatagagcagagaccaatatgtagtcatctggcttgtgagggaatcatcagctgtcataggtggaaaggatgtcaatgtgcacagaaactggtggttttcaagctgctctgaggagctgaagggttttaatacccaatctatgggatgaaactggaaggcctgatgggcggggcttccacccctcctctgattcagccacagtgccttgtttttctttttgattttacatatgtgatttctgtctcaagttttgcaaggagaagaagatttgagtcttggaaaggtctgaaagctgctggtgcaaatcaaacctctcacttacagatgaggaagctcatgtccagtaacgcaaagtgatttgcccaaggtcgcaaagcttcttggtaagggagttggagctaggagtcctttagtttccctgttgtctggggctgagtagagagaggtattattctgagaagcagagagaaaatggaacataggaaagtgtactgtgtttccatctctctgggatgccgagtaagacaggtctcttgaaacacctctagggtgacagaagatggcatctccacgatgatcaacaagaacaacaattcatgtgtgaatcacttctttggcttttggctgagatcaagtgcaatgcacgtgtgacctctcgtcctctggtgtctctgatgattagatgaagacaggtaagtctgctatagagtcttcagagtttgtgctgtagagctgccgccatttcccaacttcactgctaatacaatttttcttctatactctttggtttattttttattatttttggtggattcctaggagagatttatagaaatatgcaccaagtcagccatatttcccaggaagatttacagttgagtcatactttgatgtattgaccaaggcaaagttttaaggtaaataattagacataaataaaaacattccatatatttattattttatttttattattattattcttttgagatgcagtcttgctctgttgcccaggctggagtgcagtggcacgatcttgactcactgcaacctccacctcctgggttcaagtgattctcctgcctcagcctcctgagtagctgggactacaggcacctgccaccgcacaaggctaatttctgtatttttcgtagagacagggttttgccatgttggccaggctggtctcgaactcctgacctcaagtgatcagcccacttcaacctcccaaactgctgggattacaggtgtgaaccacagtgtctggtcaagatatttattttttaaagcaatgtctttgttattacataaaacagtgaagatttttttgagagattatacagcattgtagtgggagactggtaaactatctctgctccttgctagttatgtgacactgggaaagttacttaccctctctgtgccttgaatttcctcatctgtaaaatgctaataataatagcacctccatatagggttgctatggggattaaatgtgttaatacatatttaattatatatacatatacatataacagccaggctgttataacaatgcctggcttgggattcactgtgctttgttaatctgagtattggtatctctcaacaattcagggaattgctttaaacgttgtttctaccccttctgactgctatagactgaatgtttagtaaaaattaatatgttgaaacctaatccccagtgtgatggtattaggagaagagacctttgggaggtgattaggtcatgagaacagtaacctcatgaatgagattagtgcccttatagaagagaccccagaggctgggcatgacggctcatgcccataatcccagcactttggaaggctgaggtgggcagatcacctgaggtcaggagttagagatcagcctggccaacatggtgaaaccccgtctctactaaaaatacaaaaaattagccgggcatagtggcacttgcctgtagtcccagcaacttgggaggctgaggcaggagaatcgcttgagcctgggaggtggaggttgcagtgagccaagatcaggccactgcacttcagcctgggcgatggagtgagactctatctcaaaaaaaaaaaaaaaaaaagtatgagaccgcagagaactcccttgcctcttccaccatgtgaaaacacggcaaaaagacagtcatctataaaccaagaagtgggccctccccaagagccaaacctaccagtaccttgatctttgactttccagcctccagaactgtaagaaataaatttctattgctgataagccacccagtctatgacatgtttgttataacagctggaatagactaagatacagcctattgacctcctcaggactcatctcttttgtatttctatttctttgtctctggaggaacttctgaataattttcttgtttctagcctttaagttattcctattctgatgcactctgtccagtatgctttgagatctatttgtgatggagacaacttgctgaacacaacagtccgttatctccttcttttgtattaatgatattgtagttggacacctggatactaagctaggtgacatttctcagacacctttgcagttgcatgtggccaggtaactaacgcttcaatagaatgtgactggaagtaatgtgggccacgttaacagagcaggtgcatctcttctatagcttttctccttcttgtgagctagaataatgctatcctaaaattgtctccagaacacagcaagtccttaaactgtcactggtttgcaatgggataagttggaaaatggaaagaaaagcactcagaaacacggcagtaattcaacattgtcacaatacccaaatgtagtcatttttctgataattcattttattacattttaaaaaaggaatggttcaaaagcattgaaaaataaaaactatcttatcacctgcacctgtgaccagctgagattaatgtcctaggggatagttgagaaagaagaaggaaggaacttgcatccctcagtgaccactcagcagagcagtctgcctgctgcaatgttcacctcggactttacatgagagggaattaaaccatcatctttttaaacctgtcgaatgattattaggcctctttctgtggcagtcaaaccttacctcatcacacatccatcccattttaaaccccaattcttacatattttatttctagaaattgtatttgattattttaaatatctcttaatatttaaaaataaattctcattccttgatcatatttgcaagcctctgttgttttttaatctttcaacagttgttaaaacaaagtcttgtttcagcaccaagctgcaacagacatgaactttcaaatggaggtgccaaatgtccacgtgcagatattcatcaggaatttctgagaaacttgctctgaaacactgagactctctcaactacttgaagaatagaaacccaatctctactaaaaatacaaaaattagccaggcatggtggcacatgcctgtaatcccagctacttgggaggctgaggtaggagaatcgcttgaacccaggaggcggaggttgcctccttaatccaaaggattaagagcatggacaagaaaagattttggtgaagaagatttcttcaggaaaattgatattgagatctccctcctgtcttcaccacaaaggcgatcctgcaccaaagttgatgggaggcaaaaccagagcctgccctggggacagccagtgtctgggtagaccttgactaacttaaaaactagttggaaatatctttgttttacttctctttcctttatttggttgaggttaaaaattataaaaatagtgcatattaccacaatctgggtgccgtaaacaacaaaagtttattgtctcacagttctgaagggcagaagtctaaattcagggcattagcaaggctgtgctccttctgaagcctctaggatcattccttaccacttctggcttctagtagccctaggcagtccttggcttgtgacagcaaaactccaatttttccctgtgtcttcttgtggctgtctttcctctatctgtggcattctcctccctgtatatgtctgtgtccaaatggcactctttttttttttttcagatggagtctcactttgttgcccaggctacaaggcagtggcataattttggctcactgcaacctctgcctcctgggtttaagtgattctcccacctcagcctcccaagtagctgggattataggcatgcaccgccatgcccggctaatttttgtatttttagtcgagatggggtttttggcatgctggccaggctggtctcgaactcctgacctcaagtgatctgcccactttggcctcccaaagtactgggattacaggcatgagccaccgtgcctggcccaaatgtcactcttcttataaggacaccagttgtattagattaagggcccaccctactccggtatgaccacatcttaactaattattgcatctgcaacaacctcatttccaaataaggtcacttttttgaggtgctgggggttaagacttcaacatatgcttttttggggaacacaattcaactcatagcatagggagagaaagtaaaggggtggggggtaacgaaaaggtgagaagtccatcttctgaggtccatcttcccaaaacccctgtttctattctactcagttggtctgtatccttacttcctcaataaacttttggtacaaacttcctgcttcaaagactcttgaccttctgaacttctacttaattctctactccattcctgaagactgccctccaccctcacccccactttatgcctttgtcgccatgatggatcctgctcaccattcctcctcggtgcacccccactcacctaggtctgctgtgcacacaaggtcacagccttgaccttcttgccctccccaacaggacacatatcttgcctcttcggcttcttgcccagcacacaatgagactcacatgtccagaaatcttgccttagagtccccttcctccccaacctcactgatccgaccatctgctagaagccaagctccagccacctgcttgaggactgcttttgtgtctcagtgctgaggatcccagggtaaactgctagggtgagaaaattctcacgttggcccttgaaatttcccatatttttcctttaggactagtatggcagttatatccatttgtcaaaatacagggaccagtgcttgtaaaggaggaaaatataactgttggagaaacatttactgttagaaaatcttcatgtgaagtgtataaaattaaattgaggcttggagttcaaacttcttcccctgattaatcctttgtgtttctatgaatacactagtaaaatacaagcccagtatgttggaaaaacaataccttaaacctttgagtgaggttgacccaggagcactgaatagcttacttgagatggtagtttcctgaggagatacctcccagaaggctgtgttaggttggtgagaactttgcgttgagcattagggagctgaagcaagtcttttcaccattctggattttggtttcctcacctgcaatagcacagggtaagtgagttctttcagccttaccattccaattattttaaaaaatgatcaaaatcttttaaatttgggattacaggcatgtgccaccatgcctggctaattttcaattttggggggaacaaaattcaactcatagcatagggagagaaagtaaagggatggggaataacaaaaaaatgagaagtccatcttctgaggtccatcttcctaaaacccctgtttctgttctactcagttggtctgtatgcttacttcctttaggaatagtatagcattaagcacattaagcctgttaaatatttacatcccgattcaatacatttatacacttttgttgccagaaaataatacagtgaccttttatttctgtaacaatactcactctacccaaacctaggagacaaataaatctacaagttatttacagaaaatttaaaaactatatgaatctggaaaacttacagccctcaattcaactttctgaaattcagggtttcatttttttcccccaaacacacgagccagtctaaatttttttttatctgaacacattgtccagatacatcttgatccatccctttcatgaaggaatgcagccaaaagtttcttcctccctgaaaagcaattctctaaatcaagaccaactttttaatgattcaaagtcaaagacgcattttggatgttgcaaaaagccgtttagccagaagaccatgcttctcatttgccctaatgaagcagtggcttaaggtttgggaaaagttctttggagattatgtacgactatatctacaggtacatagagccattcaaagtagaattttgcaaccatattttcaggcgatcacagaagtctctcataaaatcaattcttcattttaaaaaaagttatattatttaaagtacaatctatgtgtacatagactaataatttggccagaaatgtgtgtagcctgtttgggactcaggagtgcagtggtggtttggaaacagattggggttggctggtagctgtggacattcactggtggcacatttggtatccatttcctttctgcttccttcccctttggaggaagcatctgcctgcattttgtggctgcctagcattttgtttggagttccagggtaagcgctgcttggaataagcacatctaggaaatcccatctcgtttggattagccaaacaggctgctatgctctaaatgtttgtgtcctcccaaaattcatgttgaaatcctaccccataaagtgatagtattaacaggtgagggctttgggaggtgatgaaatcacaagggtagagcctcatgaatgggattagagcactcattaaagaggcctgagagagaccccgttggccctcctgccatgtaaatgggccctcaccagacaccacatttcctggcccattgatcttggactctccaggctccagaactgagagcaagagatttctgtagtttagaagctacccagtctatggtatttttctagagcaccccaaaaggactaagacacagcccatagctttcctctggccacagggatttgctcagagttgctcgggtagcataaaaatcaggggccgggcgcggtggctcatgcctgtaatcccagcactttgggaggccaagggtggggggggggagcggatcacgaggtcaggagttcaagaccagtctgaccaacatggtgaaaccccgtttctactaaaaatacaaaaattagccaggcgtggtggcacgcgccaatgatcccagctactcaggaggctgaggcaggagaatagcttgaaccccaggggggtggaggttgcagtgagcagagatcgcactactgcaaaaaaaaaaaaagaaagaaaaaaaagaaactcaggacttctgtgggaaatggctctgtttgaggaatcataaagccctagtttctgctgctggtagcgactttaccatcatgaggaaggcaaagctgatatgagctaagacgaaaacatgagcgaattgcagagaactcttgtggtgagagtggggaacagtggaaggagggaggagacagtgaacacaaaccaataaataaatgaggtgagcatgcaaataaatgaaatggggtcatatgatgtgtggtgaagagaggatgggagcctgcctttgatgggctgggcagggagacgtgtgccacagccccattgtggacgccaggaagctgagctagggggatttcacatgaatgagggcatcggccatgtgtctttgcagcagacttacagtatgtatgtgtcaattcctcgggactcggtggacctgaccctcttgtgtctttcctggcctctggtgtcatagatcctgtgcagtgtcttgctcacttcagtgggtccaagtttaggtttttgcagtttcgcaaaggggtgtatgaacaaaaggaaataaacacatttgtgtcttacccttagactatgtctgctgaaagagaaggagacggattttaccttggagcgtccctcccggaagacttgccaaggaatgcactttggactggaagaatttccacagctgtgtggagggtggtgttctgatggccaagccccaaatgatgttgttggcccatgtggaagacttgatctttgcagggaggtcaaggaaacctagcaaaaatgatggaaggtaggaaggcaagaatggtaggagaaatatgaaaagaattgggagtttttctccttgagcagaggcacctaaaagcagacaacttttacatagtagcttgattttgaggaagtcctttttctgggcctcagtttgctcatctgggaaatgaaggagattaacaatatgatccatacagttgctttcggccctaaattctgtgattcgaggaaaaattacatatatgaaagatttttatgcataagcaagggtctgttttccaactccattgcaacaaaagaggaaaatatgagatctgaagcagaacttcttgactttgagaattttttctctaggagaaaacaatggatgttttaaaatgccagtttcttggaaatttataaggaaataatacattgctatttttttttctgggatgaaattatctaaaggatccaccccctaaaaatgtgaatttgaatttgcatggaagttaatatattaaaatgtaaacgccaggttctaagttcttaaaaaaagttcttgcatgtcagcaggggaggtgtgaggtgacttctttagcaagttacttgtgcatttttagctatatgaatccctcttaaagaggagatactttctaaattgagcaagtgcgttttataatcctgagatggacacagagcaaaatttggaagcattagtttttaaaaaaatattattaaaaccatgctctaagtttaaaaaatgtggaaggcagagtaacgtatcttccatctccccaagatagccaagtgcttatcctaggagtttgcaatatgttaatttacagggctaaagagagtttgcagatgtgcttaaagtaaggatttgagatgagattatcctgggttgcccaatgtaatcataggagctccgaaaagatggaagagggaggcagagaaggaatgtgtccacagaaacagagcctggagtgatgtgattggcagaaggggcattagctaaggaattcaccagtctgctagaatccagaaaaggcaacaaaacaaattatccctcagagcccctgcaggcagcatggccccactgacaccttgattttggcccagtgaacccatttcaggcctctgatttccagcactgtaagataataaatgtttgttgttttaggcattatgattgtggtcatttgttacagcagataggaaattcatacaaaaagagaaggcaaaatgaattgatgcaggaaaaaacagttaagaaaaggagcaggagagtcaagatgaacaggaaacagaaggagcagaagagtcaagatgaacaggaaacaggagacgcaaaactgggctccggaggggccaggggtgctgctgccaggggctgtggacctgggctgctgatctcctggaagcaggtggaatgtgtggggccagaggggctaagagaggaagaaggtgatgggctgtgagggtagtcagaacaacgttccctgcctagttgtcccagtgatacggcttcaatggctggaggaacaccatggttcttagtctcgcaccgattttgataaaacgacacggacacacgtggagtggttctaaggagcgaaaagtttattaggcaagaaagaaggaaggaaggaagaagaaaacagctcccctgtacagagacagaaggagggggggattcgaacaaagagaaaaccctgtgtgcggtggaaaagtggctgcttatattcctatgctggtggaggtgatgtctgatttgcatagggcccaggggattggtttgaccagatgtgtcatttacgtaacccgtgaaaaacctggccctccaacctaagccctttaaatacgtaaatgtgggttgccatgatgttctgaacacacggtgttatctggaggtggccatgacacttggtacacctggcgatgagaggtgacagcatgctggcagtgctcgcagccctcgctcgctctcggtgccgcctggcctcggcgcccattctggccgcgcttgaggagcccttcaacccgccactgcactgtgggatcccctttctgggcaggccaaggccggagccagctccctcagcttgcagagaggtgtggagggagaggcgcgggcgggaaccggggctgcgtgccgcggcgcttgcgggccagcgcgagttccgggtgggcgtgggctcggtgggccccgccctcggagcggccggctagccccgccggcccgggcagtgagggccttagcacctgggccagcagctgctgtgctcggtttctcgccgggccttaggtgcctccccgcggggcagggctcgggacctgcagcccaccacgcctgagcgcccccgccccccgccgtgggctcctgcgcggccggagcctctccgacaagcgccgccccctgctccacggtgcccagtcccatcgaccgcccaagggctgaggagtgcggccgcacggcgcggaactggcaggcagctccacctgcagccccgagcaggatccactgggtgaagccagctgggctcctgagtctggtggggacttggagaacctttatacctagctaagggattgtaaatacactaatcagcactctgtatctagctcaaggtttgtatatacaccaatcagcaccctgtgtctagctcagggtttgtgaattcaccattaggcactctgtatctagtcagtctggtggggacttggagaacctttatgtctagctaagggattgtaaatacaccaatcagcactctgtatctagctcaaggtttgtaaacacaccaatcagcactctgtgtttagctcagggtttgtaaatacatcaatggacactctgtatttagctaatctagtggggacgtgcagagcttttgtgtctagctcagggattgtaaatgcaccaatcagtaccctgtcaaaacggaccaatcagctctctgtaaaacagaccaattggctctctgtaaaatggaccaatcagcaggatgtgggtggggccagataagggaataaaaccaggctgcccgagctagcagtagtaatttgcttgggtcctcttctaatgtgtggcaggtttgttttttcgctctttgcaattaaatcttgccattgctcactctttgggtccacactgcttttatgagctgtaacactcaccgcgaaggtctgcagcctcgctgctgaagccagcgagaccacgaacccaccgggaggaacgaacaactacagctgcgccgccttaagagctgtaacaccgcgaaggtctgcagcttcacttctgagccagcgagaccacgaacccactagaaggaagaaactccggacatgccccctttaagaactgttaacactcagcgcgagggtccgaggcttctttcttgaagtcagtgagaccaagaacccaccaattctggacacagtgacaaggaaaagacagcggtaattgccacattgagtgaaccaagtttctaaatggctggcatttgcatattaaaggttgcctgcccggcccttcaagccaccttttctgttagaaaagagatggttcggggctgtttttttattacaggaaaatttcctccgagaacctttaccctgagtagctgcctggaaattatttcttaagaacacctgtatcaccagcctgcatctccctcaaagcagaacctgagataaaaaggcttctgtgtgagtgttttttctgagaatgagggaaatacagaaagacggtggaagtggggaaggaaagctcctaagagtacgcagtattgaaatggtccctgcctgcaggtggctggtttctgaccagggtaggtgtgccgccaggcctggtgagaggggctcttgcttttctagacactgcctccctgtgctctaccatgctgtagactcatttctattaatgagttgctccgtcaatatgcaactcacatttggtgacaattattttcattaaataaccagatgaacagcctctctgagtatttgagtaaagaacaaaggccgttttgggggaagtcggacctgaatgggtcttggtgcacaagaagctgagaaagcaggagagaagaatccagaggaaaaagagggattcacacaggaggtaggtgaattctcccaaatacacttttctaatgtttgttttttcttttcttttcttttcatttttttttttgagatggagtctcactcttgtagcccaggctggagtgcagtggcgtgatctcggctcactgcaacctctgcctcccaggttcaagcgattctcctgcctcagcctctcaagtagctggggttacaggcgcatgccaccacgcctggctaatttttgtatttttagtggagacggggtttcaccatgttggtcaggctggtctcgaactcctgacctcaagtaatccacccacctcggcctcccaaagtcctgggattataggtgtgagccaccatgcccggcctaatgtttgtttttccttagggactttggtggcagccagtgagctgatgcctagacctggggattagaactcttcagtgttaccttcatcggaagcctggccttctcattccacctcacctccttctagctgtgtcctttctggggtgcacacatctctcgagagcagggaacaatctgctgactttagggaatgctattggcctcatgatgctccctggtatcacagggacagtttaaatatttcaaatttgagggctaggaatccctttgggctctctgacccttatcaccattgtggcattttaataatttcatcttagtcatctactcactgctctccacttaaaccattcatcataatttgtggttggcgttatctggacaggttgggggaatgagctgcaattgtgacttctgcccccaattcaatgatatttattctgggtagggtctttcaccaatctcattttgtcttagtggtctctcagcatttttgaaacacgtgcccatgagcataggaaagtccccaaagaaggggggacacttccaactactcagcaagaaggacctttttcagattcccccgtgtccttcttggattactatgatcaggacccagcatcagtctgcagggaaagtgctaatagcgcatgcattttactgactaattggagaaaaaggaggaagggagaccaatgttctgagactaaaggggatgcagatctccccatgtggctttgtcccatccatagataaggaaatccaggataggtcctacatccaggaataagcctcacccaggagcgttttggtccccttcttaaagcctcactatggggagtcagaactcttggaaagtagctcctcccacaggctcttattgagacaaatgttctaggctcaagccttggatgtttcagggctccctgattttgtgtcctattgaggtggagacaatgccacaggtgcacttgctttgtttcttcctttccctggacactggggaagactgttacttccagccttcctagcaggtgggttgggagcatgtgactaattctggccaatgagtgaaatggaagagacacgcatcacttttgcgctgaaacgtggctgagtgggaaggaggtctccaggctttcccatctcgtgcagagactcccaccaaccccctctggatgtgtagcataagggagaagtaaatcctcactgaaattttgagactaacttgttaccacagcataacctcgctgattctgattattagcaaggatagcccgtgtaatagtttggacatttggaaattttctttctcattgaaatttcccacattttcttttctttccttcttaatgcatttaagtgcttattctatattgagaatataatgggaggaaacaaataattcttgaaagagaaattgcaaaacgggtgatgtttaactggagttgtttcatgcttggtaccctgtgggggtataactcggatggtggagtaaatggagagtgacacagattttggccagatagagccatagggagtgacgtctggggcagggtgtatttatgctatcaagatggcatttctggtcacagcggcccgctttccttttaatagtttctatattcctactctgtataaaactctgtgtttaagtgtgagcacagagccacaggtcatatttggccaggattggagagagtaggggaggaagaattcattggcagatgaggacacagcacaaatttggattttggcatgcgttttccagcagttgcatgaaggaaacccaatcttcccttcaagacatctcatttttgccttccacctggacttgttctcggggatctgctttccagtccaaagggaccgtttcctttctgtccctcaatgcctgtgctagttgttatttgccgtgatgtctgttgctatcgttcctttatttcaattccactcctgggcctggccttctaggaggctctccatgctcccaacagttctctcccccataactccctggccattaacctgttttattgtcatggtttgatggtgaaaagttgctctttgctttccaaaatgacagctagctgatgcgtttgtcccatccctatcattgtgggcacttatgtggatggctgatttcataggaatggggagggatatggattcacttcttcctgccaaagtgggtaaaaatataccacagtccttcccccaaagaggtagatatttgagccagttctttatctgcctcagagcaaggattctcagtgctggctgcaaagtcgaaccacccgcagggtttcactaatactaatgtacagctccgtcttcatataaagagatcggttttttcttttttggagttgggtgttggcgttcatttaatcattcactaatcaacaatcaacagtgattgatgaatgatgatcaagtgatgtcttatgctacggactatcctaggggctggggatatagtgataagaaagacaaacccgcttccccattccagcggaggttacattgtagttgaggagtgaggacaggcactaaataagcctcacaataagtaaccagagtaatttcagacggtgacatgtgctgtggatgaaggtagggagtgtaatggagggagcctgaggcaggtgtgttgttcacttaatatggatgcttctggaaggttcaccgagaaggtgacaatgaggctggtatttgaaaggcaggaggtgacctgtcatgaaatgtctggggcggagtggtcaaggctgagggaactggggattcacctgtcctcagacaagaattggcttaggatacttcaggaccaataaacaaggccagtgtgccttgaggaagaaactgatggcagaaaaccaaggtagagaaatgaaaaaacggatagacatagagtcagatctgcagggtgcaggcttgctgggagaaatgatttgcctccatagtagtgatttctaaaggtgaaagcaggcagcttctcaccaccagccaactacccaggcgttctgaggcagccaggtctacgggcaggttcctctcacgccccccatccttccctcctgtttctgggacctgttgggaccactgtgcaggtgggacaggttgctgtggcagtgctgtgtcctgctttgcctggggcctgaagtccaagtcttctctttctttgagagcaacgtggatcaggttgtgtcttttctggacctcagtttctttataggatgtcgtgaggatgaaagagtagcatgtgtgaggttgcctcccacgtctgttcatctgagacacagaacacacttggggaacattggtttccattcctccttctctgaaatagcaaaaaaggacagagaaaagacactttcttttcccaacaattttgaatgacagtaacagaactctgtatctcttactgaaaactaattttattgaggttcaactgatatataaaaagctgtacatatatagggctggacgcggctgctcatgcttgtaatcccagcactttgggaggcgaggcaggtggatcacctgagattaggagttcgagaccagcctgaccaacatggcaaaaccctgtctctactaaaaatacaaaaaattagctgggcatggtggtgcatgcctgtagtcccagctacttgggaggctgaggcgggagaatggcatgaacccgggaggcagagcttgcagtgatccaagaccgcaccactgcactccagcctgggtgacagagtgagactccatctcaaaaaaaaaaaaaaaaatcatgaaaccatcatcaccaacaaggccatagacatactcaacacctttcaaagtttcctcccatccccattatcatgattattattgtggtaagaacagttaagacaagatctagtctcttaacagatctaattatactatatactaactatactccctgtgttgtgtgttgtatctcttacgtaactggaactttgtaccctttgaccatctccccacttctcccactccccagctcctggaaaccatcgttctactctctgcttctatgagctgaactattttagatgttacgtatcagtggactcatgcagcatttgtctttctgagttggcttatttcacttagcataatgtcctttgggtagatccatgttgttgcaaatagcaggattatcttcatttgtaaaggctgagtaatattccattgtgtatagatgccagattttctttattcattcatctgtggaaggacatttaggtcatttccatatcttggctattgtgaataacaccacaataaatcttgatgaaatctcattgagaaataaacaacgtgtaactatgattgcttttaaacctgaggaatggctgctgcccagactgaaagaaaatcgaaaatactgctgttatctgactcccagaatagccggctcctcctcacttaactcttacagttaatctccagcccccagaggtgggcctcttacacttccttatcagggcacagagcatttctcaggcgctctttccatacacgaaggaccatagttttagctgcaagatctgagtttatgtccagtctttatttaacaaacaaatgtgttctaagctgcattttgctttctacttcctgaagttaataactattctcattgcgcgctcctttcccagcaaaaaattgtgggacttgaataatggagtattttcctgtctccagttggatgacaagaacttaaaattatttttagaaacgcagttgcccagagtgagtgtaattctaacagggttgtctccactccctgtttgttttagctggttctcactatgtttgaatgagagtgcaggccaaaccacagtcaactctgaatccttgtaaaaaacctccctagctcggctgttgaggagtgctacaggtaataccccgttttgatggtttcctgttgtgttgtcatttgcctatatacatgtcagtcacatattaagattctccagagaaacaacatctatatctatatctttatctatctatctatagatatgtctctaactctatctatagatatggctgtatctacagatatctctgtgtgagaggagatttattgtagaaattggctcacttggttatggaggctgaggagtcccacaatctgccatcagcaagctggagaaccagagaatccagtggtgtaatgttcagtctgagtctgaaggcctgagaatcgggtggtgcagtggtttgagtcccagtccgagcccaaaggctcgagagccaggaaggcagaagctggatgtcccagcagacatggcaagaatttgccctgtctctgtctttgtgatctatttgggccctcagtggattgggtgggccctcagtgggttggatgggcctacagtgaattagataggccctcaatggattggatgggcctgcagtggattggatgggccctcaatgggctggatgggccctcggtggattgcatgggcccacagtgggttgaatgggttctcagtggattggatgagccctcagtgggtgaatgggccctctgtgagttcgatgggccctcagtggattgggtggtgctaacctgcatgggtgaggatggatcttgtttatgcgctccactggttcaaatgttaatctcttccagaatcaccctgacaaatacattgagaaatactgttttatcatcccttagcccagtcaagttgacacatcataaaattaaccatgacagtcacagaatattgtcctatactcaagtcataacttgtcatgtagacaagttagcatccataaggtacagtggtcatagaatctgaacacttgtctgggagtcatggctttgctactttctaaccatgttgctctcacacctttaaatggagagaggaccgcaccatactcacaatggaatcaacctcttatgacctttgtgagaactgaaatctgggttttgcaaactctgaaaagtctctgaataccagaggttcctgagagtcttcctacagctcaggagtgtgctcagttgccaggagggaggctgagctcttgggacattcaaagtgagaggatgttcctaacacttcattctagcagctccaaggagctagacagagaaaagagaaaatgagaagaggcacagtcttgagttggtgtgaggcaatggcagggggaggcaacagcttgtgaggacagggaggagaagtagcccttccaacatttcctagacgatagtgcctggtgtgtggtctggcctcatcgctggcttggcgccttccttgcttctctgttagccgacatcggaagttgctgcttctcctttgctcagggccaggtggcctgtgagactcacaaggctctccaagaggggaacttgcctcctcccctaattgccttcattcttgtgtcatcatgtagaaaatcatttacactgaagtggaatttagcctggcttagctgtgagtatctggatttccactttcatacaatacaaaggcaaattacagcatcaccgttaacagtggctggaccctggagacctcatgactttccaggctcctcacttgctggtgtgcactgtgctagggctgtggcgagggttaaatgtggccatgcacctgtcattggtcagcccccggtgtggttcagagggacgtgatagaagaattatgtactttcagaatttcagcctctagtttatagatgagaccatgaaaatgatttgtctacgctcatacaactcattagtggctggtctgggacaaagctccagtcccctgatagccactcaaggtgctcttctcacttgtgcgtggctgagaacacaaggaaaggagaacttgcctcatctttatggctggggctagagcagagtgacataaatgtaactgggtttatgtgtcccaaaagacgagggctgctaggtaaaatacaggatgcccaggtcagcaaaggctttttgggatgtacttacactaaacatttatttgctgtttatctgaaattcagactgaactgggcatcctccatttttattttctaggtctggcaaccctgtgagagatgaaattcacattaaaactatttagcaaaccaaacgatggctatgtaaccttgtcttggtctccacttagaggcagaatctcagtgctttctgaaagttcttaggaggcctgtagctacatctgcagtggtgccaaatctccatatgaaaccagaacaattcaatcgcttattcacagtctagatgtttgcaccgggtagacaaaatattgaaatgtttggcagaattgctcaattgtcctttggaagtctggcatcttgcagctgcagccttggagttcatcctgtgctgggacagtatctacagcccagctctctgatctgtgatgaccctgtagtgtctctcccctcctttcttaatgaggctgggacatgctactagaattttcaaggatttagctgaagtctggacatgctttgcattttgttcattttttggcccgagactcacatgtatgtacagttgttttacttcagtctgctgataaagctcagacttctgcagacttctttttcttagtttctgttaggcaggaaacccagaaaaaaattcagacttttttttttttttttgccccaagagcacaatgaactgcaataaatcctgtacatataacaacactttgacctcattaagaagatggatgaagaacagtgatttcaaacagcactggaagcccctagcagctcagggctccttctggaggaaggtgcattcattgattcagttattcattcattcaactgactttactaaccctgtgtggcataggagagagatgagcagctggggaacacagcagatagaaacacagacttgatggccagtaggcctgggttctgttcttggttctgtcacctattagttgtgtaatcttggccagttacttcatgtgtctgcacctccatttgtttgttcatctgtaaaataggatgaataacagttcctacttcataggattgttctgaggattaaatgagaattcatgtaactgcttaagaacagcgtctgacatttagtaagtacttacaaatgttagctattgtgttggacgcatagctatggagatgctttgatctcagaaagggcaggctcttctccctaaaggtgaaattcagagttattgtttggcaaagctggctctgagtcatggctgaggaaccttgtgctgtgtgtcacaactagttgtctcattccccttggctagcaattggtctgggaatggccctgatccctagttctggctaatgggatataaatgaacactttcttgcttttctgaccaataaaggaaaaaaacagaaaagaaaaagaaaggtccctttgacctggaagctggttacgacgcttggagatacagcaaccattttgtgaccttgaggtcacagcctaaggacaaaggtcaatgtgctaaaggaggtaaaaagaaagaacccaggtctctaaggctatgttcgagtaacttcaccagatagcctacctccagacctcttattaagtgatgaaaattaacatctacttttttaaaccactgtaaccacattttccatcatttgcagctaaatggatttttccttggtaaaaccaaataagcaaaaaagcagtctctttcctcaaggaaatcacagccaagtacaggcaaaaatgccatgtattctagtacgataaaatgaactagcaaagtaaacaaagtgctctgtgcacacagaaaagaaacagttagtaggcaaaggggatattttattggattataaagatccaactctgcatgatctcagtgtatgacttatcacccatcatctggttctcaatcagaatacccttccacaggaaaaagaggcaaaatcctccacctcagggccagatgatgatcactcaactttgtgcttcccaggtcaatgctgaagcatccttttctgtttccttcttggtcccagctctcaggacactgaccctcactgtgtggcctgaaatcctgctgctttattcttaacactgaagtctggcatatctgcttgccatctgttcctcctgcctacttccagcctacagtccttgctggaagatttgttgcttgtggtctgtgcttggtttgggtcaaagacaaaaggacaaaaggatttgtagagaggagaagaagagtctgggggctaaggatgtcacagaaagcatcctagagggagggaggagcagagaagttggttggagaagaaaaagtgagttgaagaagaacgagagatgactctggagtggtgaagagaggctgatggaatgaaggttttggatgctagcagaatccagacttgatgagactagcagtagggagtcactcgaggtcccgaaatgagaatgtaatgattgtggaaggttcttttggcagttgtggaaaggctagtttgaaacagtattgactaaggaatgaaggaaaatctgtcaaaagatttgcagtcatgaaaaaagagactgggtgcggtggctcatgcctataatctcagcaatttgggaggccaaggcaggcggatcgcctgagctcaggagttcaagaccagcttgggaaacatggcgaaaccctgtctctacaaaaaatacaaaatttagcctggcatggtgatgcaccgcctgtaatcccagctacttgggaggctgaggtgggaggatcgcttgagtctgggaggtggaggttgcagtgagtggagattgcaccactgtactccagcctgtgcgacaaagaaagatccaatctcaaaaaagaaaaaaaagaaaagggagactcttccaaataatttcagaggcataattgaccgtttaagttatatatggacactgtacaaaaggctctgagctgggggctccactttgctgtctacagcattagccttgctatcacaactcattaacaaggatttgctgacaacagccgattgaaaagtgaaaacttcaatcagtcaatgttttggccacagatttttttttttttcacttaattgggaagtggtttctgtgtcttagagacatagcctatgagaagacttcttgctagatttgcctgtctctgttagaagaaagtcatggcaaatgaaaaagttggaggtattgggtagtacggcagttcatatagaatcaaaaaaatttttattacagcgttaactgtgtgtcaagccgtggtttaaaagctttacatatttgaactcatttaattatctgagaaactatgaggttggcacgtagcattctcccattttacagattacattctcgtttcaggacctcaagtgactccctactgctagtcccatcaagtctggactctgctagcatccaaagccctcactccatcagaggaagctgaagctgagagaggctagggagattgctcagtatcatatacctactaaatggtggaggcagcttctgaatccatgctatagaggctgtcatcttaaccaccacacttgacagcctcccattttttaagccacatcgcccaagagtaggactaagtccctagggcttatgatggccatgccaaagtctagatgttccctagaaaataaagggagcactaatagaaaaatggtccctcttcttcatctcattattgctggtccagtgctcataggtttcaactatgagccctattgatgaaaagtgacccagggaccttaccgagtacttacagccagtgagagtgacttgcaaatcctagtacgctgacagagcccatgatgaagaaccgagtcacctcccttataataaaccaacaattgagggagaggcactaatccaaaaaggacattgtgtaacacttatgagagtttttgaaaatagtagaagggcgtgtgaaagtcaaattgacgcttaagccttttacatatgggtgcaaattatacggcagtacaattaaaaatatctaatttgacactcaagtcatctttgaaatttttagggttaacagaggctgttttaggtgagatagggaatggcttgtagctatgaagggaagggatggacgctattcagcgtggaacttttgggggtgttgccaaagcaagtcttacgaagtgtcatgatataccatctgtaggagaaaatccacagtgatcacattttgatatgaaagtcatctcttggctgggcgtggtggctcatgcttgtaatcccagcactttgggaggctgaggcgggcggatcacttgagacccaggagttcgagaccagcctggccaacatggtgaaacctcgtctctactaaaaatataaaaaaaaatttagctgggcatggtggcaggtgcctgtaacctcagctactggggaggctgaggcaggagaatcacttgaacccaggaggcggaggttgcggtgagccgagattgtaccattgcactccagcttgggcgacaagagtgaaacaccatctcggaaaaaaaaaacaaaaaaaacccaaaaagaaaaaagtcatctcttttaggtagataagtgcaaacttaatgagaataaatggtagcagaaaaagttgtttttaatatggatgaactcactctaattcctttagagtgaactatcgagttgcgtgcctatgatgaagagcatggtgcttcaagttacagtttagttaaaggactctgaagtcgttgtttattgtgacccgagcttgtagtctattgttaatttgggcagttaacaaagggttgttgcaaagggttttgttaataaaacaaacagctacatcttaaatcgacacctgaacactgtatacagattctattattacaccttaagagagaaaaattggatggaaagaagagccaaaatatatggggatggtcaaaaggacagaacaagatagggatagagagtctaccttaaagtcaggctgaaatgaaaagaccccaacccttcaatggggggcatgttcaaaatctgtaaatccacccacagcgtaaatcttttccatttacttcccaaaggccaatgtagcaggtgtgattactattccaccaactcaaattaaaatcaacactgagcctcctccctcctggggggcagaggttccatctcagacagaattggggctctctcatctgccccattccctctaccatactcagggacttctcaatgttccgaaggcctagcacagagcagagtgttggcaaggcctctatggcttttggtctatgcttattactgtcgaagtacctgttgttcaaactaaagtggtcctttgacgtttgatagtttcgcatgtttcttagccatgagaatctttgctgaaaccaggacttcagagtgtggggtttagttctcccaactgtacaactcagccttttatggcaaggtaggcttccttcaaatacccaaacttaggtactcctgctgatcattgatctgagcataataggctgcattaaaagacaacatttttttagaaaggtaaatatcacaactgccatagaaacataaaattaatatatataaaatatttcagttaactgttaatgagaagaccagtaagatgattaaaccagttcaaaggagaactcaaagaatgcacacacacatagtcaatcaaatactaaaatcaattttctaatatatgcaaaactggttaatatccactgagcaacaaccaactgcatctctagtagacaaatccatttgtatttttatggacaagagtcatctgcattactatcagttttccacaacttacatagcagtaagatttctcagtagcaacaaggcacagatctttgtagatcaagtaactcagaaggatgtacctagtatttgattgaaaggatacccagtaaacatttttgcttatttttttttcaattgatgcaggtcagtaatttttattgcaactggaagacaatatgtcacagaaactttatggtaggtctggggaaaagtgttatttacaataagtgatgaaatagtttgtccttggcaatatgattacatatgaagaatgcaaaatgcaggtatggatgccttctaagcaacaccatcaagttcctagggttgggctgatggcgcctgcctccacattgtttctttaggttcacacgaacatcactgaacatcacgttctttctcctttatggtcctccctttctattcatgatattggcagtttcatacagaaaatacagaaaaaaatcggtttttgaaaaattaatactcttgtaaattaatttggccgtgtaggtctattggccaaccaaggtcagacgaccctaagcatcaataataaacctcttggtcgtctgatcgctttatcacttttttttgtttgttttgtttttttttttccgtaaaacaaaactcagaaatgttacagaatcagagtattaatttttcctccacatttttaccatggcagtattaagtagcgagtgtgaatgacgcagcatgaaactgattactgaatcagctatgagctcagttggcctcaacatacatactcaagaaatgttgcatgtttaaatattgcatgtttaaataactgacagtatgctaaatctcatctaaaaaaaggaggagaggggctggggaactcaggccacagtcatgaaaggatgaatacaatttctaggtttaataggttcaccatatcgaagtttttgagaatccaatatggaatatcaattattttgcaaaaggtagagaaagcagttctcaacttttgcaaatgaaatacagtggaaaaacactgttgtatatattccaaataaatagtcttgatttcaacactaacaaaacaaccggaagggtactcctgatcatctcacggttaggtcagaaatgattgttcacacaggtctgatttcacaagtacaacagcaaggtgcagcaccatagacacgttggttttagctgttaaaagatggatcattttaaaaactgtgttttccttccttaatttttggtcagtgaagctagcacttgtttgctgaactgtggaagaactgcaaggtcacgcacattattcatgataaagcaaccaagctgatgagtctgtgcttaattatagaataaccagtaggagagagagagaacacaaggagttcaccaccaccgcaggtgctctcaaaggaagaggggttaacagatgaattcacaaaggcagatctatacagaatactgaatgccatgtgtaaatcctcatgaaactccagaaacaggaacaccacacaatgcatatactttgatttacacattccattacaaaggaaaaaaagacaccattacaacttggtatgtaactgcattaactgcgatataaaccaagtccagagtttggcaggtaactaaaagtgggttatcacttaggttatatagcaaaagtgttgatgtatattatatagagtagtataaataataacaaattattatttaaattagatcacagtgctgcattatgtgcataacagtgatatagggacctacgacactaaggacttaactgttaccactgggaagtcacaatcaagaggaaacacagagttccaatgttttcttttggtggcaaaaaaaatcctgaagatggctgggcgcggtggctcacgcctgtaatcccagcactttgggaggccgaggtgggtggatcacgaggtcaggagatcgagaccatcctggctaacacagtgaaaccccgtctctactaaagatacaaaaaaatcccccaaaaattagctgggcgtgatggtgggcacctgtagtcccagctactcgggaggctgaggcaggagaatggggtgaacccaggaggcagagcttgcagtgagccgagatcgcgccactgcattccaacctgggcgacagtgagactccgtctcaaaaaaaaacaaaacaaaaaaaaaaaaacttgaggatgaaagaaaaatacttctctacagaaacaataaaaatcggttgcaacatctgggcagctgtgatccagcagaaagaaacgagtcccaacctgaattaaagggaaaaagaaaccatatgaatttaatccagtctcatctagaaaagcttcccatttaggtcacttgtatgtaactccaattccttctccaagagcccttccaggagaggcgcaaggtccccccacacagagtggaatgagtggaacttgcgtcagtagcccttggcttaggcattcctggcatggtgcaggactctgagctgggcacagaaggcgtccacctggttctcgctttacagagcccactgcctgatgccctccctcaggcaggagcctccttcaacacagtggtccctcccagaagactccttggtagtaactgctgtggccagcaagcactacacacattgaatgcctctgcatttttattttaaagtcacttttttctttttttctgatacttgcctacatatactgaatcaaaatgtgggtttcaggcagcaacccagcaactaagtaattcttaatgactaaaggttgatagtgaaaaatgagttggctctgattaatgagattagctagctggtcatcttagagaataaagggggtcatgttgtgtccagaattggtgggttcttggtctcgctgactaaaagaatgaagccgcagaccctggcagtgagtgctacagttcttaaagatggtgtgtccggagtttgttccttctgatgttcccacgtatccggagtttcttccttctgatgggttctgatcttgctgacttcgggaatgaagctgcagaccttcgctgtgttacagctcataaaggtggcggggacccagagtgaacaacagcaagatttactgcgaagagtgaaaaaacaaagcttccacagggaggaaaggaaccccagcgagttgttgacccttgctctgtggcctgcttttattcacttatttggccccacccacatcctgctgattggtccattttacagagtgctgattggtgcatttagaaacctttagctagacacaaagtgctgattggtgcatttacaatcctttagctagacagaaaagttcttctagtccccaccctattagctagacacagagcactgattggtgcttttagaaacctttagctggacagaaaagttctccaagtccccaaccaacccagaagcccagctggcttcacctctcaatgttaaagagagcctctactgccaggtatgtgcaagggagagaacagattggagattatatccagatgactgtatcagaggtgccggtggggtcaggggaggagtcctgaaattgggcatgttttattgaggtggtttaaacaagagactggttttgatgtgagggtaccagaaatcctacacttttcatagaatggttttagaatttgccttgatgaaaatttacagaggaagaaaaagataaaagagaacactcactagaagtagttaggggttgggtccctaaattggagtctgattttggtctgatttcccgaagttttcattctttcataggggaaactcaaatactactcttaatcttcttaaccttaggtggagttccatgcctccagcttatcagcttcccctgaaatcatggacgggagtttcttagagtgtagtcacacctcacagatcctataagcatctaggccacagactgtaaattttattttttgctttacatctcccctgtatctattgagattatcataaacattttcccctttaactctttacttatagttttaattttgaaataattttagatttacataaaaattgtaaagatagtttaaagaattcctggataccccccgcccaattttgtatgttaccgtggtacatttgttaaaactgaaaaacagacattgctccattactattgaattaactccagactttatttggatttcaacgttttttctattagtgttttctttctattccaggatccagttcaggataccacatgatactaattctgtggtctgtgagtttctcagtacttttttttgtttttaatgaccttgagagttttgaagagtactggctgggcatcccgtagactgtcccccagtctgagtttgtctgttgtatttttctcctaattcgatccgggttatggatttttgggaacgcagccatagacgtgaagcgcccttctcatcacattgtatcagagggaaccttggtcacttagtgaaggtaatgctggcaaggcctcttcattataaagttacatttttgtcttttcttctctattcattggaattgagccactaggtgatttgtgatttctagttccatcctttagaatgacttagacatttttgtttgtttgtttgcatgaaagttccaaataattcactgataacaccatctgggcctaaagtctttttggaggtaaaattttaaaaaccttttaaaagaattttcatgatttcttctgggtgtgatggctcaagcctataatcccagggctttgggaggccggagcaggaggattgcttcagcccaggaattaaggctgcagtgagctatgatcatgccactgcactccagcctgggtgacatagcgagactccgtctcttaaaaaaaaaaaaaaaaaaaaaaaaaaacaacaaccaacttataatttcatgtctataaaggtcttctacatcttctaaatgtcagagtttttggtaattaaaaaatataatgatcaatttcattgtgattttgaaatttaatagatggtgttttgcctagcatattttattcttgtatgtatatttggtatcttttttctggatttctaatacagatgtacattttgttttcatgagtaggcatgctatttatgttgtttaatttgtggaggaagtggtagcgccttccagacttgtaagtctaatgcagaaatgggaattagtaaggtatatgtgctgcaacagtgaggtttgctggagcaaagaacactggagcccaggggcagattcttgggtactttgggcaggtctaggtaatggtggaccattaacatagaaaactaggcttatgcctacttctcttagaagctctttttggtagatattctagtttggaagtatagaggcaacatggaactctgggagagatagaagactattgtttccaccctccagtgctacttcttagactgctttctgctaatagctacacaagatttggttatgcctcctgcaaagggcttctgcccagcttgagatttacagctcttttcaccactataccggtaggatcaggtatttttgggtatttgggcaggaaaaagaaatcatagaatgtcaagtctgtgtaggacctctagttcaaagctatctttctttttcctcatttttttttttattatttctctctctctctctctctctctttttttttttttttttaacagtttaagttctgggatacacatgcagaacatgcaggtttgttacataggtatacatgcgccatggtgatttgctgcacccatcaacctgtcatctaggttttaagccccgcatgccttaggtatttgtcctagtgctctccctccccttgccccccaccccacaacaggccccggtgcgtgatgttcccctccctatgtccatgtgttctcattgttcaactcccacttatgagtgagaacatgcggtgttttctgttcttgtgttagtttgctgagaatgatggtttctagcttcatccatgtccttcctttctcctcattttaaggatatgagaactaaggttaagtaagggcaaatggatgttctaaggccacagagaaaatcagtggtgaaattaggacttgcacccagatttctttactcctggtttagtgctctctcgtaacgtcccactgcccttgattttgacctaacagacgtagaggccatacacatagagaaaaggcaatgatcaatgtggtggagtttaaacactctaaatccagggaaagttccatagcgtgggtgcttctgggctctgttgtggagatataattgcagcgggacctgtcctagtcaaaccgctcacaaaggtttgaccctgcaaatctccatcaactgagctttacaaatccccagggaaaacataggcatatttggaggagttgctttatctcttcaatctacttgtgaagtaatcctgaacttttagagcacagccaagggctgggatacttgccagtccatatacagtgtccatctgtagggatagactagaattcaggctaaacggagattccctctttcggctgctgcgtgctgtctcagactgtgtatcttgaagcaggatccacattcttggcaggtcagctgtgaaacgtgtttgacattggtggaaaagggcagttctcagatccaggagccttgctgcttgtctgtctgcactcctgaggaaccctttggcagaagccaacttcttgcgagtctgtttggctttctctttgacactgatggagcagggtaagctgactccaggctcagaaagttcccttccctccactttgtgtagaacacatacaaacccgcctatgtgtcagacgggtatgttcaatgcccatttgaattccctcatcgcaaggagagtaatgggaaatgcaaaagcgaattaaggttatgctatgatgttatggggtgatgaggatttaatgaagggaagatcatttattctcttctcaacctctaggacccaggcttgttgatttgtttataccactgtccaactgtctgtagaatcacggtacagtgggacagattttagacctcaaattctgggatcttggcattaagcccaaaggagatctgggatttccctactgctttaataatttctgctggccctcctggagtcatcttaaactgttcccaaggtaaataaatcagctgccctagagtggaagcatcccattcatacagacacaaacccagagacaacaaacaaaggtaagaaaatgccttcccctgagactgcgcctatactttgtaaaatcgattcctggggacgctgtgaatggtattccctcaaatcatgccccatgtcctcttctgccctggctaagacaagttgactgatggggtacactgcagtcttgagatatgcaagagagggcagaggccacactgcataaagccaaaccacctgctttagaaaagtatgtgcacagttgagtgagtgaagggacaggtaggtgatgaagcagctgcctctcgtgacagacattcagtgtagctcaaaggagctgtgccaaccaggtgggtttaaatcccttcctccttccatgcaagcagtgatggacacctgacaagaggccaccctacctttggtggcttccagaagaaatggagtgagggtggggcagggtagataaggaacataggaaaaatgcagagaaatgagatgtttgtaaaatttgatgtttatattttccatctccaggtatttttttttcctgatttcagacttttttctgtttctcctctagttttatagatgcaatttgctcttcactctcattgagattctactcagaggcagttagtttacttaccttgggaacagaaaacagttcttgtttttacagtttttttgagcaaattacaatgataacaatggtaatttctgggaagattacaactatgcaattttcaaattatgaaacttccactggtcggaggccttactgagcagcttattcagctaatatttatacagaaaaaaagaaaaatcagcaaggctctagctttaaaagttctatcatctcttatctgtagtcttttttttgtactttttataaatatagaagttcaaatctgcacaaagatgtatgttttcacgctgacatctttgacattctttgatcttttcatgcctccatgtatatattatttgaacatgtgtaaaaccttgcaaattagagggaaaccagattattatcctgtattcaaaattctgtcatatctgcaattttaatttgaaattgcaactgtgagagagacttcagggaaaagtattaagatagcttctaaaatatttgcttaatattaattttagaatttttagaaaacacaagaaagaaaaattaagaaatcaaaagtcatgattgtatcatttagactttaacactttggtgtacacagttccagtctctcttttttatatgtatagatatgttaaaataaaatggaattttaaaaaatataactttaaaagtcccttttacatattttaaacgttttcttttattattttttctattacattatcttaatgggtatatatcatcccaccatatagctataccataatctatttaatgaatctcctattgttggaaatttagattattttcaataattcaccattactggcagtactataatgttaaccattgtagctatatctttgtgcacagtcatgattatttccttatgataaattcctggaagtagagttgccagatcaaaatgtatgcaaaaattctaagacacaaaaagattgcctaaaagttgtataaatttatcttcccaccacctatttgtcagaaggctcatttccctctatacttggcaataactgataaattattattttttactaatttataaataataaatactacaccattgtcttattaagcacttacttgataactagtgatgatacattttgtatgtttactgttaatttaactttcatggttttaaattagcttttcatgtttttaagtttttttgcctttgtaaatagtcaacttaattgactcatcttattagttgaataatgtcttagttcttgcttttagatgtttttgagcaaattacaattataacaatggtaatttctgggaagattacaactatgaaattttcaaattatgataattcattcctttgttttcatgtttatacttttctttttcttagtacattggctgaaacttctgtgtgtgctttgcttcaaatccttggagaatgtcttgagctcgtgttaattccctgattaattgtcttcagtacataatatgctgctcattacctccactgtgttttaaaatttgatgtttgtattttccatctccaggtatttttttcctgatttcagactttttcctgatttcagacttttttctgtttctcctctagttttatagatgcaatttgcccttcactttcactgagattccactcagaggcagttggaaacagaagttttgatgagactggaaatgccaagacattttcctaaaagttttctcttatttcatggactaatacatgtttttaacttattagttctcttcttttgaattgatattttcattttatttagtgatttttctttgtttattctttttttttttctcttttgagacagagtcttgctctgtcaccaggctggagtgcagtggtgccttctcgactcactgcagcttccgccttcctggttcaagtgattctcttgcctcagcctcctgagtagctgggattacaggcacatgccaccacacccagctaatttttgtatttttagtagaaacggggtttcgctatgttggccaggctggttttgaactcctgacctcaagtgatagacctgtctcggcctcccagagtgctggaattacaggcgtgagccactgtacccggcccgttcattcttacagtagcaatgttatgtttgtccaaaatgaagagtagagatggcgtttatcaaatacagagtggatgtttattcaaactctttagtcctgaagttgagagccagcttgactgtgtccccattttcattagtgtgcgcttggtgttaactgtgagttgtagagtctgcatgtttctaactcttgctagttttatcagagaagctgattaatactgatccttcattgactgcccctggcttgcccgccctactagctaccatggtaactcagacttaggggccctctaaagtgactcctgctttcaacattttctttttggctgtctcttaaatgtcaaggttctgtggaccctacctttgtcctcttttcccctcattctctacactttccattgtttctgtcgccttcatacacggcttcaaccatctcttatatgcagaagactccccaagtcagtatctccagcccagacattcctcttaaatataaaactggacatctccatgtggctgtccctcagctgatcaaacagagcatgcaaaaaaatgattgactgcaaaagaagcagtcttaatcaagcttcattacccaatttctgggttgaacaaattcacgccatcctctctgtaagtcacagtgacaatggcagcagagctctgctgagctctggtaccacatctacccttctgtttccaccggtctgtgctctgcaggagtgagtgtggttactctcaaacttggttatataagtaaacctggtactaagacttgtcctgtaaaataatgaaatttgaacaagaagggcgttgatgctctgaaaaccatattggaagctttgtaaagaatttgataaagtgaacttacttaaaaaaatgctgcaaaactggatatgctttggttaactttaagagcgaaggattaaaacaaagaaacaaacaaacaacaaacctctgttaaaaaaccctgagaacttttttttttttttttttttttgagacagagtcttgttctgtcgcccaggctgcaatgcagtggcgcgatctcggctcactgcaagctccgcccccgggttcacgccattctcctgcctcagcctcctgaatagctgggactacaggtgcccaccaccacgcccggctaattttttgtattgttagtagagacggggtttcatcgtgttagccaggatggtctcgatctcctgaccttgtgatccacccgcctcggcctcccaaagtgctgggattacaggagtgagccactgtgcccggccaaaaccctgagaacttttaatttagattgctttacaagtatctataagtttccactctacttcaaagatatcaaaactgggaattatagatgattcattacgggtattgcttctgtgagaaaggtgaggtagaactccccactagctaacttgttcaaaggccttggccctatatcaaatgattggtgattgattgatacatttgaatgttaagataaaataaaaggtttaagacatgcatattccattttcagaaattattctctttttttaatttttatttttgagacagtttcgctcttgttgcacaggctggagtgcagtggcacgatcttagctcaccgcaacctctgcctcccgggttcaagcaattctcctgcctcagcctcccaagtagctgggattacaggcatctgccaccatgcccggctaatttttgcatttttagtagagacggcattttactatgttggttaggctggtctcgaactcctgacctcaggtgatctgcccgccttggcctcccaaaatgctgggattacagtcatgagctaccatgcccagcccaattttcagaaattattctcctatcattgatctcttgatcagttatgagtcctgatttatcgaatcagagggcttgtattatttgtatcttttattcccaacatcctagcagaaagccaggatgcagtccaagctctgtgaaacttgagctgctgagctagctgcaaaggctggcttggatctgtactgtaatggctctatataattctctaagattctcttgtggtttctgcagacacagaagagggggcatctttggggaagtttccatttttagagaaggttgttggtaaagcctttttagctcatagtatttacactttctacttcattaaatgtccgtatttgtcatcatgattcccaagcacttgtcggttcctttcggtaggggcagtacatttggcacagcttagagaactacccttcattttccccattagctataatctaagacagaatcatccacatggacacaactttgtaaagggcaaatagacaacatattagaaatattaaatatgaaatagtactaatatattagtaaaatataagtgtacataccctgtttaatcactggcctgaactcagtggaattctaatggaaatagttttttattttttgctctaaatgatgcctccaatctgacttccagcctcatttttctgttttttaataaatcttgagcacagaccataattttcaggtgattcttcactgttaaaattaagtccacggggccaggtgcggtggctcatgcctgtaatcctagcactttcggaggccaaggtgtgcggatcacgaggtcaggagttcaagaccagcctggccagcatggtgaaaccctgtctctactaaaaatacaaaaattagccgggtgtgttggcaggcgcctgtagtcccagctacttgggaggctgaggaaggagaatcacttgaaccgggaggcagaggttgtagtgagccgagattgagccactgcactccagcctgggtgacagagtgagactctatctcaaaggaaaaaaaaaaaaaaattaagtccagggatgtctgctctggccatgatggagtaactagtactagatttatccttctaccagaaacaactaaaaaataagagaaaatatatgaaacaagggtttttggacattagaaatcaggtagcagaggacagggatcagaatgggggaaacaaaaaagggtgagccctatgatggccccagcttactgcctggagaaagtctccaggctgcagcacagggaaaggaactcgggcagagctgatgttctccttgtgttgaaaagacagagatgggagtgtgggaacgcaaggcagctggatatcatagggcatgtatacaagagagaagagggatttatggagagaaagccccagagatctgcagagggtcccccttgagccttaggtgagagctgagtagctcatgtacgtgaagaaatgtccccaaagctggggaaagaaccacctgaaaggagtaaaggaaacaaattccggtgttcaggatttgagggtatattagagatacaaaggaagatgcggaaagaccagggactctgggcatcagcaggacatggatgaggaactgggttgtggaggactcgtctttgggcagagatcttgctccattgcccaggctggagtgtagtggcgtgatcatggttaaccacagtctcaatttcctgggctcaagtgatttccctaaatagctgggactataggtgcatgccaccatacctggcttaatgtttttaaatttttggtagagacaaggtctcactacgttgcctaggcttcagtgtcctttttaaaaatagattttattttcatttatttatttttttgagacggagtctcactctgtcacccaggctggaatgcagtggtgcaatctcggctcactgcagcctctgcctccaggttcaagtgattctcctgcctcagtttcccaagtagctgggattacaggtgcccaccaccacacctggctaatatttttgttgttgtatttttagtagagatggggtttcaccatgttggccaggctagttttgaactcctgacctcaagtgatctgcccgcctcggcctctcaaattgctgggattataggcgtgagccactgcgcccagcctaaaagtagattttaaagtggaatgcaacatacaaatagaaatgtacacaaatcatagtgtgctcattgagttttcactagcacacttgtgtaaaccagattatgaaatagttctccagaagctccatttgcacccctcccaatcattaacactgctcccctaaaggccactatcgcctcccaccccctgtccatcatcatcaccaaggcaaaccttcctcctcagctgggcccatttacaatcccctctgcagttgctgcttctctggcggacactgcctggcttagtgctgggtggcaggtatccaagtgctggctgtcttaggggtactgcttgagttctttggaagaccctgtggggtctccccactgcccagttccctgacacaggctctctggctctggactgatgtccgttcttcgtcagctccattattaaagtctgctcgcctggcaggcagccctcttggtggggtactggaaagatggcttgagcccagctacattccacagtgtccattcaaccatgggaaattcatgcatcctggccatgccagtgggccaaaggctgctccacgaccccctcccatttccctccacttctcttttctcctgttattaaggctatgatggatggagatctccaactggagagtggaatgctggtgccagtaccccttcctgcaggcccccatcattactgtaggagacgatcttggataatgcccctcgcttggctttggggaagagtgaggaaggccactgcttgtcacgaggctgacaacggcctgtgcgtaatcaattttcctccactcattctccttttaaaggggggcaaggtagggagtgtctgtggagcaagggcagtgttctaagggtacctaggatttattttaccttggtgtggtaagacacagacggggaaatgactgtcatgaaaacagtttttatactcacagatctgtagaagcagggggcactggatgccatgtagggccacacagggaagcaccaggtgggtcaggaggcagagggagagggggaagtataagtaagggcctttactggggtttccacagaaggaacaggtgaggcagggtgagcagggttacgatcggctagtttgcatgatttcagcaggctctggggcatggggctgtccctagttgtctgggacctggccctggggggattaagggcaggtggagtgtggcccagagtgtaagcgcccaatagaggaggtggctggggatggaggctctggattggttggttcgcatttgaaagacatgctcaacctgactcatttactgtatctaggaatgagctaaccttgggaggggcagtcccaagggtcagcaaagtcccaagaagccagagcagccaaatgcagaaaaagacacaattaataaagccaatctcattatctcatagtgagctctggggggccaggggtgggggtggaggggttctggttgttgttgggtctttttagaatgtatgttactttttacctctttgtcctcagctttggggtactggctgttaattccgagatgacaggaaatatctcaacattctgctatatagtgattagtgaaaacatgacattgcatactatctgactttcctattagaaattaaagcagcaaatgctgaaatggtctacactgttgactggggctcagggtccaaagattctttggttgcaagcaatggaattcaactggttgatatcaacaaaaccacaatctgtgaaatgtgtgtagagtagctcaaggggaaggaaaagtgactttcaggcctctgaaaggcagagagctactgttggcttccagctgccacagcattttgtatgcccaggagtcaggttccagggagggaggatccttggccagaggcttgaggttcggggggatctttgattgacattctcatcaagactgtgtcataaagatcgaggagtgatttcccagaggaaaataaagggctagtaacaaaagaagaggctatgaaatctgggttggaaaaaccaaaagatgctcattacaggtagacaggtgcacataaagagtccagatgtagcttcagaaaagccatatttgagctccttctctgtcactgattattttggtcatgatttttatggacttctttgtccacctataatatacaggtatttaatacctaccttaccatattgttgagacaagtaactataaatgctataaaaatgacaagccgctatatgattcgtaccacattagtacaaactacgtcattccttgtgttcctgagttgccatcatctcgtagatggtgtgtgttcttgtcactttgtatggattccctatgaaggcactgatttgatagtaaagcataaaaactttaaacgtcccatggaaatgcaagcatgtcctagtctaatacatttttaggctctgaatccccacatggagccaatttgacatccagttgtacatctaaagtaccgttaaaaacccaaccctttatttacctagattctcgatttatcttgaaatgaaaagcatttgcatggagagaacttcgtgcttttcagcatgcaaaatgtcaaacagatcttatctgacctgttgctgcccccgtgcacagccctgagtggctccaggatctgcgttgacaatattccaacgtgttcagctgatgtgccaaaacctattgaaaaccctaggtctggattgtgctaacagcaccctttcaaattcttgaaatccaggcacatcctgggaggaaagaggcctgcgaggtgtctcacttctcttacaagagggatgggtgagaaatgaaacctcctgggatccagacaaagccttgggtattgctagagacatgtgttttgctaatggacagacaattttgcatagagacattccagcttaacctggagctgtgctctctgctgggatgctggccctttcccatgggggcctttgcttgagagtctaaggactttccagtgagaaaactgattctgagtgagtacgagggtcaggcacattcttcgttgcctttaatagttgttggaggaatgagtaattctgaaagctgagtgtgttatttatatttatttcctagcccgatctccccatggttgaggggtactggggggaagtgtggatttctagtgtgtgttgtggatgtgaaataaatctcagtgacctatagtcttaaggaaggcaagacacaaatggcgtggctttggtgctggagtgaaacagccaaacggtgaagcagagagagagagagaggctgtttcaatgatctgtttctgcgggacagtctattccaaaacagtggcttaacacaaccaccattgtattagttcttatggttttgtgggtgaggaagttgcgcaggccccggctgggtgattcttttgcctcaagtggcgtctgttgggccatgtgatggtatctagccaatgcttttctaggctaagatgccttcatttacatccccggcacactggcagggatggctggaatgcttggctcagctgagtcctgcttcttctctggagcctctctacttggtactgggaggatactcagcttcaacctggcagctcagagcttcaagagaccaaggcagcagctgccagtcctgttccaggctgaaatggagtgactttcacattctctcttggttagagtagttgcaggccagcccggattcgaagacagagaaagtaagcccagctttagtgagaaggagggtcaaaggagttatggtaatcttttattttccatactggcattgtctcttcttctgcaggcagtttagagtagctacggcctagggtgggttcctaggaaagcagtgttgtccctgagatggtagagcctggttgttgagtatagacagtgccctgatgaggtagcttgcctgtatgtgacgcggggttcccctcatgcagtgagggagggagagtggccgacgcaggtgttagctgactggacttgggtgtatcacatggagacaccctttgggaactcccagaagtacttggcgggtgggaaggttgttgtacaaaagctctatacaccctctgcctggaccttgatgtacaaaagcatataaaggcagcagagtctgggatattgctgttcatgtcatactccatcaatatatcctctccaccttacgtgcacacccactggcagatatggtttgtgcagaagttgattatgtgtgttgaagattcagcgctagcctgacagtttcttgaagtcctgtccctcagagggcagcaatgctgtgcaggcatggctcatcagaccccagtctcacctccgtggtgacatcacccgggatgtagtgaatccctcatgaacaccaagctccttttattgagggctcactcctccatattgcactttcctgtttagttctcacagctccattgaactacggaattcagactctcatttgtacagatgaggaaacagaggccgagaaatgttaagtgatgtgccaagctcacagagggcaagcggatctgaatgtctgactgcaattgtctttcttgaaggactcatctcacgaggagcccttccaggcaccagcactgtaagctctctaagaggagtgtgcttatttttcctctgctgccaaggtgtcctctacccaagctcacaaacctggtaatggcgccctttcacttcctttttttgtttgtttggagacagagtctcactctatccccctcgcccaggctgtactgcagtggtgtgatctcagctcacagcaacctccgccgcctcccgggtttaagcgattctcttgtctcagcctctcaagtagctgggattacaggtacctgccaccacgggtagctactttttgtatttttagtagagacggggttttgccatgttggccaggctggtcttgaactcttgacctcaggtgatccacccacctcggcctccccaagtgttgggattacaggcgtgagacactgcacccagccccctttcactttctttagccaagaatctggtggaattcctgcaagacaaatgctctttgcgtgtcatgtttcctagtctgacatggtcctgccgggtttcagcaggtctcatccatcgtgagatgatgctaaaggagatcgaagcagggtcttttggtttctaattccttttgtttctaaaacagcctcgcttaagttctcccactggtggactcccaggaaaagaggttggtttttcgggcttttgattgagcttctgatcatagattctgctgcacacatgggaattgtgatggggacgtacccaactgctgactggtgtctttgccccacacaaagatttcatccctattgtttggggcattctctatttttaaaaactgtcatccctcagatggcacatctattgctatttcttcaaaatccatttgaagaagtcgtttttaaatgtgttggtgtgtgttcagagttcagtatcctccagaaatcaattttgaggaattccacctccaagttctacctccaaatagttggaacaggttggagctccagctattgcctggcagtgcacataactgggcagctgacagctgaaggctgtcatcaaaccttccgcttttatcccacccttccttcctctctcccttgccttctcttcttgcccctccacataccttacaatacccacaaaagtaaaactctgcaaatgttcggggtcctggtataaagtgagaatgagctcctgtcatgtgccatccaaacaaccaaactcagtctcctctatcttccctgctttcagctgattgttcttgctggcacacagctgtgagatacagtttctccactggaaagccttccccattgcatatggtggacaatccattgtgctcacatgcattcaaggatcttcgcattcccactccagcttgtctttcaaggcttacctctcccatgttaggacaaaccagactattcaccttcttcacaatgctttcgacctctgtgccttgctggtattatttgtctgtctagaatgcccttctttaccatatttcgttgtcaaaagctaaccagtttctctaagccatgcacaaatttttgtcttctcagagaatccttccttgaatttcacagcctgagtaaatctcatatttctctatgttctcatagcattttctaagtaccttttttataggccttcttacattcttacacacagaggctggcatgcttggaaatgtttgctgagctgtgaatcagttatttgtgtgcgtgactaattaattactgatgttcaggtttgtaattttagttcagagactatgctcttgcttatctttggggccttttctgaaaaccagtagtaggtgctcaataattgcatagagttaaatgatactggttagcgcacatatttcttcccttctggaattgatttaaattttcttaaaatgtttataattttcagtcatttaaaaaaagagacaaatttttgctattcaaaagtagacaatccctggtttacatatttgttgaataattggcccatgaatctgaggcacgaatttttatttcaatgtgagcatggcatttactgccactgggtggcagtgtaccccaattacaagactgtctaagtgactactagaccctgataagtgctaaaattacaaaccagaagttacaaagtgacagtctgtaacaactcacatctagattctattttagtgacagagattctagtacaataccataatacttaaatacttcctaaaattaatatcttcgggtatgtcactattctcctgttgaatatgtcttaattatcttgtacttatggatatagaatagagatgtaaatcttatggagaattgccagaaaattaaccactggcaacgttttatgaaggatgttttaaatgtttaagataaggtgttcgcatatggctacacaggtttaacccctcactgtgatttccaaaatctgtgcagaaggaagagttctatgtacattttctactcctccagaaagtagtgcaaatatgattctgaaagtaacaaggaacattctggaaaaatcaaagcccacaaacccaggaagcaccagctgtgggagtgttgtcagcaggggcagtttgatagtctgtgggaggaagcaaaggtgattttggaagctgggtctggatacgagtcacattttctaaactcgcatttgtccttgcacatgctaggtcatgtcactcaggttgtaaccagaaaagatgaagccgtgttttgcatttgaggggagtggtggagagaagcagcagcagcaagatcagggacctgcagaatcaagaagcttctcttggatgaggaactaggttgctggggactcgtccttgggcagagtgcatattcttggtgtctccttttatgtaagatttttgctactgcagaggtaaaaggagctgcttaatggtgcctttatctgccaacctaatttcagagctaaagttgggaagcttgagtgtcgtgggaacactgggagtggcagtcattaagcactgcagggttaccgagaggcttgtcttctttgttcaaatgacttaagacaaactagggaaagaacatgactatatatttgatgcttagaggaatctgattgcacaaaactttattgataatcaaaatttatttataattatatattataatttaaatatattataacacattttgtaattctattataatgatttacatcttgtaatttatttataattaagagggcaccttcatgtggggaaagttggcgtcttgtaaggagaacatttactaaggccatatcgtatcagctgcaagacctgctttgagttcagcatcatttagcaccattagtccagaatccttctggctaatagctcttgcactgacaaatgaaataacaaacaacacaaagtgctactcttacagaaccagcggtgtgattaccagactcttatgggtcctattacatagtgagttcacttaatcctcccaacacctgtatgtgacaattgtgataatctctgttgtaaagataaatagcacgaggctcagggaagttaaataacctggttaagctcagacagccagccagctgtgaaactgggactcaaatcattgtttctgatccagccttggttttcccaaggtgatcaaactttggaggacagatgggccacgggaggaggcgagcaaatgtttgttggcacgccagccacactgcacaagtcccagagatgccattcggataggatatcactgcgcatgctctattctgagactagtacccctgaatgggggcagcaccgtgagtctgtttgtttgactaccttctgatgttgtcagggataattcaagaagctaccatttttgcatactataaattatattgtcagagccacagtaaataattatgtccacctctctggagtgttgaggtgtttccttgatcagtatcttgattttatctacctgcctggctcctagaaactaaaccatttgagattttcttagtcagagtctatggtgacattccttgcatatgcaggcaccaaataagaataaacttaatggttaatgtggaataactgtttattacgtgccaagtgctttccatacactgtctcattcaaccatcacaatgagtttttccttaactctttgttttatgggtgaggaaatggagtcttagagagacgaacaggctgctaaatgacagagtcagggcttgaactcatgactccacagcccatctctaatcagtactctctgctacgttggttaatgatgcaattttacttcaggggatggagataatattgtcagaaaggacttactagctcaagggaaacaagtccatctgtcttagaaagtccagcttagacaatttttgaaccatactaaactgtataacaatctgttcaccaccagctgtatgatcttaagtacattatttaattttcctgtgcctgttttctcatcggtaaagtagggataataatagtaactacttaatattactgccaggaataaatgagataatgtacgtaaaacacttagcaaaatgcatggcacatagcattaataaatgcattaataaaatgcttaataaatgtgagctatcatcagcagcagtggcattgtcaccatcatccttaacattaggtaaaagctacttacattttagctactgtgctcaagaggaagcaagaaggtaaaaatgatgttaagtcaataaaaccaagatacaaagacaatatcttttgagatttgacatgtaaacaatgagcctcttcaggaaacagaaatggttgaagaccctaaagaccaaagtgtcccaaggaccctacttggggaaggtgtctttgagttcagctgcagaacttcctgagcattctggaagttcctcaccatcgctgcatttggaccagatgatgtgagagtctcaggtattcctcgcctaatgggtgtttgctgttggaaagctcacgtatacttccacttaaaaagtttgttgtgtaaatccaagatctttctcagagagaacagtatcagcaggagaaagctatcctcaagattggagctcattcgttcactcattgaatttattgcgcattttttctgggcactacaactaggaagattaagagatggccacattcttcaaggaagtcacagactgggaagggagagaaatgttattaaataattacaaaatagtgtcatgccagcagtgtgctaaggaagatggtgggataaagcagggagaaggccaggtttcctcctgggctctgggaaggcaggatctcaacagtgtgcgctccaaaggccttgactgttgtgcgctacactgttagccctacaagtttcccccacctgctgcctccagaagacaggctgcccttcttctcctaggttgctgcaagaatagccatgctctctgccgagagatccgccctcagtgctttcccttcaggggtctaaggggggccgcctggagctacagcctttgccagatcttggggttcttggaaagggggcacacatggtaatttggccaaatctgggcagcaaggtaggcttcctagacctgggaagcgggaagctaagagccaagcaaggtctctgctgtgtcttagttgaggtagcagcattttccacttaaggctgactcagattctctcttaagccaaactgaagtgtgactcctttaagagatgtgagggcccacgggtgcctcggggaactgagtgacatctagttcagagaggaaagcccagactcctgccatgaaagattttgcacacactctttctctctctctctctttttttgttccttttttttgagacggagttttgctcttgttgcccaggctggagtgcaatggcatgatctcggctaactgcaacctctgcctcctgggttcaagcgattctcctgcctcagcctcctgagtagctaggattataggcgcatgccaccatgcccagctaatttttgtatttttagtagagatggggttccaccatgttggccaggctggtctcaaactcctgacctcaggagatccgcctgccttggcctcccaaagtgctgggattacaggcctgagccactgtgcctggctgcacactctctttggtgcatctttccattcttttcttccatcagttcttcatgcagactgttggcaccagctacacagacttccaggcgtccccaagcaagcttcaccctctcctgcaattcctcttcctggaatgtgtggctccataacacccccacctgctggacttctacttgactttggaggtccagtcaagctacccaaatatgtattcatctgtgatgtcttttctgctgttcctgatctcaaattatttttatttctgaacccaacacaaaaaaattaaaattgtgttgaaatacaaataacataaaatgtatcatctcaaaagggtccagttcagtggtattaagtacattcataatgtacctaatggtggtctgcagccatcagcaccatccatctccagagcttttttatcttcccaaactgaaactctgtgcccaggaaacactaagtctgcatttgccctattctcggtccctggcaaccacctttctagtttctgtctaataatttgaccactctaaatacatcctataagtggaatcatacagtattttttgttttgtgactgatttaatttagcataaggtcctcaaagccgacacatattgtaacgtgtcagaattttcttcctttttcatatatatcacatatatgcctagctacgcagacttccatggctcaccatatacatgtggcagaatattatatatatatatctcatatatatcctattcagatatgtgtgatatgtatgtcatgtcacatatatctctaccatatatatcacacatgatatctcatatcacacatatctgtatcatatatctcacacatgatatctctattgtatctcacacatgatctcatatatctcacacgtgatatctcatatcacacatgtgatatctctatcatatctcacacgtgtgatatctcatcacacgtgatatctgtcatatatctcacacgtgtgatatctatcatatcacacgtgtgatatctcatagctcacgtgtgatatctatcatatgtctcacacgtgtgatatctatcatatgtctcacacgtgtgatatctatcatatctcacacgtgtgatatatatctcacgtgtgatatctcatatatcacatgtgtgatgtgtatatctcacgtgtgatatctctatcatatatctcacacgtgtgatatctcatatatctcacgtgtgatatctctatcatatctcacatgtgtgatctctatcatatatatcacacgtgtgatatctctatcatatatcacacatctctatcatatatatcacacatatatctctcatatatcacacatgtctatcatatatcacacatgatatctctatcatatcacagatatcgctatcatatatatctcacatgatagctctatcatatatcacacatatctctatcatatatatcatacatatctatcatatatcacacatatatatcacacatgatatctctatcatatatcacacatatatatatctcacatgatagctctatcatatatatcacacatatctctatcatatatatcacacatatctatcatatatcacacatgatatctatcatatatatcacacatatctatcatatcacacatatatctctagcatatatatcacacatgatatctagcatatatcacacatgatatctctagcatatatatcacacatgatatttctagcatatatatcacacatgatatctagcatatatatcacacatatatctatcatcacacatatctctatcatatatcacacatctctatcatatatatcacacatatctgtatcatatatatcacacatgatatctctatcatatatatcacacctgatatctctatcatagatatcacacatatatctctatcatatatatcacacatatctcatatatagcacacatatctatcgtatatatcacacatgtgatatctctatcgtatatatcacacgtgatatcttgtatatattacacatgtgatatctctatagtacgtatcatgtatatatcactatatatattgacgatggttaaattatatttatcacatatataaatggtggaattatatatatatcacatatatataatggtggtggagttacatatattacatttacatataaacggtggtggaatttaactcctgtgatgaaataggctaagcgcaaatgccatcgattctgagaaaagtgcaggtggtagagtagtagtaaaaatatctccctgcagggagcccccaattcagaatagatttagttcttctaagatggttaggctatctctcttttaaagacgtgccttttctattcctgtatgcactaatcaaatctttattgggagtcttctgtgtggtgtacaaggcactgggatgaatatttaaaagcgcagtgactccatttttcatagcttttataatttagaaataatgctgagaatgatggtttccagcttcatccatgtccctacaaaggacatgaactcatcattttttatggctgcatagtattccctggtgtatatgtgccacatttcttaatccagtctatcattgttggacatttgggttggttccaagtctttgctattgtgaatagcgccacaataaacatatgtgtgcatgtgtattgcaaggacaaaaaaccaaacaccacatgttctcactcataggtgggaattgaacaatgagaacagatggacacaagaaggggaacatcatacactggggcctgttgtggagggggggaggggggtgggatagcattaggagatatacctaatgtaaatgatgagttaatgggtgcagcacaccaacatggcacatgtatacatatgtaacaaaccttcatattgtgcacatgtaccctaaaacttaaaaaaaaatgcaataataataattagcgcaatatggcatgtagagaaaaacagtggccgaagcagatgtgattgagtccaaggtgtgcaaacactgtgacctttgcatgctgaagagggagagcctttaactcagatgcattctgggaaggctgcacggaggagggaacatgttgcggttggattctgaggaatgcccttttttgagagtctgtactggtatatttctttgttagacattttgatgatttctcagccaggaaaaaaaaacatgacatttcactcaaactaactgctgctacaactggggtatgggagttgacattcatcattttgactttaaaatctgactttctgagtccatttagatttaaggtttcattttcccagaattgtcatggaggggaggaacgaagccacacacttgcagtacagttgagaagaaacagttatggaaaaaggcttgcaacatttctctttttcttcatcaaatttatatcaaagtattttctttgcaccagattctcatctttgaatcttaatccgctaatcttcagggaatttaagaaatgaaggggctggtgctccagcaaagatgtgagtggagagtttgcagcaaaggctcaacttacataaaaaatgagaacagaagcaagaaaatcacttgacatccatacagtatgggtgagagaggtggtgggtttttttgttgttgttgtttgtttttttggggggaaccatcggttaaagattcaacaggaataaaaaggaagtacttgagactagttcgctcacacgatgccttgtagcacaatttaaattaaaaataagggaatcggccaggtgcggtggctcatgcctgtaatcccagcactttgggaggccgaggcgggcggatcacctgaggtcgggagttcgagaccagcctgaccaatatggagaaaccctgtctctactaaaaatacaaaattagccgggcatggtggtgcatgcctgtaatcccagctactcgggaggctgaggcaggagaaacgcttgaacccgggaggcagaggttgcggtgagctgagatcgtgccattgcactccagcctgggcaacaagagtgaactccgtctcaaaaaaaaaaaaaaaggaatcttggacacatttctttttttcacaaaacaaggaaaccgcttcatgaaacaatctggaagcccggaacagtggggatatgactgcttggggaaggctcatcaggccaattattgaggagtatagaaaaataccgaggctgggtagaacataaagtatgaaaggaaatgtgtttttctgtttctcaatgcatatctcttattcataacgtcatagcgctcggctcagttcttcacacagactaggtggccgatttctgttgaaagaattcattcattcccttatttaattattcaacagatatttactgagcatttcctaggtgcaggcaggcaattttctaggctctgggaatatagcagtatagagataccctgctatatatggtccagaaagaatttaccagccccaaatactctctccttctctttctttgtctttaatatatctattcagagagaagagagagagagagagagagagagagagagagagagagagagagacagttctctatataaagagaatatagtctctcctatcttctgtaagaaaacaattcttggtgaaggcagtcaataaacaaaataaaaagtatcagctgggtgtgtgggctagaggaaagaaagaaatctgggaagaaggattgtattactttgctttgagattgctgaaacaaattaccacagatgaggtggcttaaacaacaggaacttattatgtcacagttctgaagtctaagatcaaattcagcagggccacactccctctgaggcactgggaagggatctgtcccaggcctctctcctggcttctggtgcttccttggcttgtgacagtgacagcatgactccaatcttcacatgccatcttccctgtgtttctgtctcagagccccaatttcttctttttataaggacacatgtcatattggattagggcccatcctaatgatgtcaacttaatgggagtatctgcagagatcccatttccaaataaggtcacatccagagatactggagattaggacttcaacatttttgggggagacacaattcaacccataggaaaggttaagtggttgtgggttgctgttttataggggtggtcaggtgaggcctgataagggtcatctgaccatggacctgaagaaatggagggaatgagccatgcagatatctgaagggagagccatttgggcagagagtgggagaatactctgcatgttccagaaacaacaaggaggcccatgtggctggagccaggtgagagagagagagagagaacccaagttcaagagattatgaagtttttcctctatatgagatggagagcccttgatgggtttgagtagtagcgtgtcataatctattgtacattttgaaaggcccactctgatggccgtctagtgaatagactgaatggggtgagagcagaaacgggggggccattgcaagagagacttgacagtgacctggagcagagtgatgagaggcgattggacttgggacatatcttcaaggaggagacaacaggattggggggtggattggacataggatataaaaccaataagtgactcaatgactcttaggcttttggtttctgcaactgaaaagatggatttgctgtttatagaaatggggagaataggttttactgggacagaaacaagagttgaatttaagttatgcaaagtttgagatgagtttttacatccaagtggagatagcaaataggcggttggagatacgaatccagcattcaggaagtcatcagtatagacggtttgggatttaatcatcaagggaatgagtagagctggagaaggaactccaggactgctccttgtgttctccagcatttagaggctggggaggtgaagcagaacaagcaaaggggataaaaaatgcatgggcaatggggtaggaacagaacaaagaaaagagaggattccgtggagttaaatgaagggagtgtttggagatggggcagagaatctgcatcatgtacagtaaggactggatactgaccataggatttggcaatgtggaaataactggtgactttgatataaggatttttagggagcaaatggaatgaaaaatagattataatgggttcaatagggccacattcagcatctccaactcctttaaaaaattgcctttacaggagagcagagaaattaccatagctaaaggtgtatatagggccaagggagaaattctttttttaatggatggtaatacagtattttatattctgatggacatgatgcaacagagtaaaagttaatgatggggagagatggcaggattgatgaagccatagctttgaccaggtgagaagttatgggatccagcatcaagtccaggagcacaggcaattaatccatagagacaggaaggcggcaaaggaaggaggttccaaagggccgcttggtagagagagtggtaagaacgtatggaaggtttgctgttgtgacttctgtttcatcggatagattagaagtaagggcacttatgaagaacgtagggagttctttaagacttgaagacagaggtgatgatgtgaaagagtttcccaggtgcatggaagaatgactggttttgagaaatacagtcggatggctgagcagctcttgcttgaaattggcagtcattgattgaaaaatggactcaggtcagcatgattggatagatttctgcagccatgttgagctgcacaggttccgggtcaaagaggggaaaaagagtaacgaatggagagaggaaaaggaagggagttgagggaagatacaagtgatgacaaagatagattctggaatctaagctgggttagaggaaatgaggatgagagaagggtggagaacagtgggcgctgattggataaggtggactgaggccctcatggggttgaaggatgctgcagttgggagtcattcaaaagaactagctgagaaagtaggtggcagtcatgagagagttgttaggtgccagcgattgggatggtgcagtagtgggtgcagttattggtgataatcaggtccaaagcatgaccataaagtggtggttgggagaaggcagaggacaatataattagaggcaagaataaagatttgggaggccaggcttctggaagaatcattgacttggattttaaataaccaggaattatggcaggagtattattagagaattaagaactaaatcttcaataaatgaggaggagtctactgaagtctgtgggtaactaaagcatggagggccaccctgtggtgacatctgaaggcatgaactttgcagtcgagcatgttggggaggagagagggatagtggtttgagaatagctgtgaggagcagggaggacagatgccaccttcaggtccggtggcatgagaagtgagagggagaagcaataagcacttcagaggtttgcagggaaaactgtgtccttggggtgagccaggttttagtcaaagcagggtgatgggaacattcagaggaaggttcagaatacagggagtctgctgatattggatgagtccagagaggtaaaaacgtgtgagagatgtccagaatgacagtgacaagggatgagcagagaaccttgggcttcccacagtgactgacttcaacagggatacaaaccatcgtggcttccaaagcagatgaggctgctggagtgtcatggggccctggaggggggcttttgtcaggagcaagaggggtgctggtcccccccatcttcactctgcttctggcattttgcagcctggaggggcaatgtcacatctggaactctggaaccctccttgtgttaaggccatggaaggaggtcgccagcacatctcaaagttctgcagatgccacatggagcagcctgaaagaggaggagagacaccttaaaattagatggtttgttgaaaaggagtgatgattggctagaccacgagggaagctcgcaggcactgtgtgtcaggcctgatgtttagttactgctagttgtaactgggcttggagattctgttcagtcaactaaatagagcctaattatccaaatagattcacaattttgtttcaatatgtaaagataaaagaccatttttctctaatgataaacaaaaagaatgttttctcagctgaataaaaggttaagctgttattcatgatgttttgtctgaaaacttttgataggcgaaactttggttcttaccatttatagctacataaaaaagatagagttttgggtaagtaagtatagtttatgaaaggaatttcaacacatatgtgacctgaacagaaaaagtaaaagaaccagagtcaattccgtagaagggctgaaatacctctttggttttgttttgtttttaattacttcagagatgagaatcactgcttaattctagagtaacaaagggaagggattgtgagaatatgacttttgaaatatgccttttaggatgggaaacatttaggaaggtgcctggagtcatatgaggagaacaccgggcagaagaattttactagagagctagaaggagaaaacgttttatcgaacctcttaacagcaagtttatatatacacttcatgtatttttcttaatagaaaagcaatatgtggaagacttcccaacaaaatggcagatctgcctgacttgtacgagacattcctttcctatcaggaacacagagaaattctgggtcaattatttgcaaatgatgttttataatccctccacaagttgaaagaaagaagaggatatcataaggcgacagaagttaagagatagatccaggccaggagagtaagtgggaactgatgctacacctgccctctgaggatgtgagactcataccgaggctcctggggatgtgggctgcaggttttggttgtttgtgattgtctgctcgctgagcagatgagctagagcagaccttcaggcataaagcctggagcctgcaattgctgctcctttgttaaaaccactccagctactagtctagagaaagcagcaagggagctgggcccttgggtggaagaagcagaaagtcaccctttctgttggcccatgggtgggagaagcagaaagtcacccttctgcctgggattcgagtttcaaattcaatactgctctataagggttagttttccaactcagagcacaacagaggaaaatatgaagaaggttacactacggaagggagtttgcgtatacttttaaaaacatctgtattcactccttagatgacgtcatcgagtattattgaaatgtcctctttatactgttgatttctgcatttatatctccagtctgaacctctccccttaattccagatggttctcaactctagattattttcaagattgtgcctctgaggagtctaataagcatctcaaatataacgtgtgtgttagccagcctcccaaatggccctcaggaatcttgggtcctgctgttcacatcctgtgtagtctctcccacagtatactaagggttggtctgtgtgattgatggagtagagcaaaagtgatatcaagtcctttctgagactggtttataaaagatgctgtagtttttattttggttgcccttgacctcgtcctatcttggatcacttgctctgtggaagccagctaccatatcttgacacgctggcagccccacgtggagaagaactaaggccttcaaccaatagccagcaggaacttggcaggcatgtaactttggaggtagatcctccagccccagttacattttcagataatggcagctctggtctaagcttaactgtcatctcacgagccgtcctaggcagaaccacctgggtaaactgaggtcagattctcaactcttagacccatacaataacaaagatttgttgcttaacctgctaaattttgggataacttgttatgcagaaatggataactaatacaatgtgtccaaaaaggctctctgcatcttccccgaagctctcttcctgcagtttttcctgtctctgtaaacggtgactctattctcccaacagctcaggccaaaaactattcttgtctgtgtttctgacatttcacatccaagttttcagcaaatccctgttgggtctaccttcataatatatctgactacttctcactaccccagttactctcttgctctaagctgctatcatctcctgactgttttattataatagttcttttggccttcctaattttgcatttgctcaatttcagtctattctcaacgaagtagccagagttatcctttaacaatgaaatcagatcatgtcacttttctaatcaaagcctttgaatggcttccaatatcacttaaggtaaaccccaagtctttacatgggctctgttgcccttcattattgtcttctctgatctcatctttcctcagctctcttccctccggccacactggcatcctgttgttgctccaacaggccaggaattatcctgtcttagggcttttgcactcatggtaccctctgccaagaatgttcttctcttcggtaactgtaggatttcttcgctcattccccactggacacaggtcttttccgtggcagccctatttaaaaattccagcctccctttattccctccacatttcctggtttatcgtctccataggtttatcatcatctgtcatcctatacattttacatatcttatgtactgtctctcttcctccactagaatgcaagccccacgaaggcagagaacttcatgggtgcattccaaatcccaacagcaatgcttgacatctagccagccactcaaatagttttttttttttttttttttttttttttgagacagagtctcgctctgtcgcccaggctggagtacagtggcacgatctcagctcactgcaagctctgcctcccgggttcatgccattctcctgcctcagcctcccgagagctgggactacaggcgcctgccaccacgcgcggctaattttttgtatttttagtagacacggggtttcaccacgttagccaggatggtctccatctcctgacctcgtgatctgcccgccttggcctcccaaagtgctgggattacaggcgtgagccactgctcccggcctcaaatagtttttgaaaaagcaagtattataaacaggagaagtaacataatatttagacaagatggaaaaatctaaaagatactataaagtaagtgtgtttaaaactattaaaagtaaaagaagtaaaaaaaaaaaaatgaatgcacttttaaaaccattcagatgtgaaaacaaccaagtagaacttcaagaaatgaaaaacatagtagccaaaatttaaaaacaaacagccaaacaaaggatcagttaaaatcagcttgatttagagggaagatctgaggaaaccaccttgaacatagcacagagctatgacaagattaaaattataaaaaataaactaaatgacttggtgtgagaaggcccagcatgtattttgtaggagctctaaaaggagaaactagtgatcatgaagaataggcgatatttaaagagacaagggcacacagttttctttcttttttttttttaattttactttaagttctgggatacatgtgcagaacgtgcaggtttgttacataggtttacatgtgccatggtggtttgccgcacctgtcaaccagtcatctaggttttaagccctgcatgcattaggcatttgtcctaatgctctctctccccttggcccccaccctctgacaggccccggtgtgtgatgttccccctctgtgtccatgtgttctcattgttcaactcccacttatgagtgagaacaaatggtgtttgtttttctgttcctgttagtttgctgagaatgatggcttccaccttcatccatgtccttgcaaaggacatgaactcattcttttttatggctgcatagtattccatggtgtatatgtgccaccttttctttatccagtttatcattgatgggcatttgggttggctcctattattccctattgtaaatagtgctgcagtaaacatacgggtgcatgtacctttatagtagtatgatttagaatcctttgggtatacacccagtaatgggattgctgggtcaaatggtatttccggttctagatccttgaggaattgccacactgtcttccacaatggttgaactaatttacatttccaccaacagtgtaaaaatgttcctatttctccacagcctcgccagcatctgttgtttcctgactttttaataatcgccattctaactggcgtgagatggtatcttactgtggttttgatttgcatttctctaaagccagtgatgatgagctttttttcataagcttgttggccgcataaatgtcttcttttgagaagtgtctgttcatatcctttgcccactttttgatggggttgtttttttcttgtaaatttgtttaagttccttgtagattctggatattagacctttgtcagatgggtatgttgcagaaattttctcccaatctgtaggttgcctgttcactctgatgatagtttcttttgaatagcaaacacttttctaggtttgaaaataagacctaaattattggatttaaattattggatttttggatttaaatggcgtgtagagtctcaagcaacattaaaaagtaagctctacctagaagcattaggttaaaactaacattgaagaccaaggaaaaaatccaaaaacaatgagaatgaaagatgaaatacctaaagaaggacaactatgagataggcagacttttcataagcaatatgccaacatacaatgtaattatgtcttcaatgtgctaatggaaacaaccattaccctagaattctatacccagctaaaagtatcattcaacatcatggccaaataagaacattttcagaagaaccctcactgactcttgctgaaataaatactaacgtatcagcttcagaaggaggaaattgaacacagaggactggagtggaattgcagttacactagtacgaaacaaattggcgaacattttgataacttgaaataaacaatgatgtataaataaggagctaatttggaggagaggattaaaaacaaggaaaagctgggcactgtggctcatgcctgtcatcccagcactttgggaggccgaggcgggtggatcacgaggtcaggagttcgagaccagcttgcccaacatggtgaaaccctgtctctactaaaaatacaaaaattagccaggcacggtggtgtgcgcctgtactcccagcaactcgggaggctgaggcaggagaatcgcttgaacccgggaggcagaggttgcagtgagccaagatcgcaccactgcactccagcctgggtgacaagaacaaaaactccgtctcaaaaaaaaaaggaaaaattaatacattaaacataaaatggtagcttggaaaaggagatcagaactgaactgtttctggtctggagattttgattggcctgattttcttttttaatgtcaagtatgcattttaaatatctaaaagaatgaattagaacgtgtagttttcaagcttgtagaagggaaaagtagaatgaaaaaaccaaatcaatttaataaaaggcaggagagaagaaaaaggaagcaaagaaaaagtacattaatcttaaatgcaaaataacataatagaagtacagttgatccttgaacaacacgggtttgaactttgtgggtccacttatatgtggatttttttccacctctctcacccctgagacagcaagaccaacccctcctcttcctcagcctactcaatgtgaagacaagaatgaagatctttatgatgatccacttccatttaatgaatagtacatgttttctcttccttatgattttttttttttttttgagacggtgtctcactgttgcccaggctggagtgcagtggcgcaatctcggctaactgcaacctctgcctcccaggttcaagctattctcctgcctcatcctcctgagtagctgggactataggcacacatcaccacgccaggctaattttttgcatttttagcagagacgaggtttcactatgttagccaggatggtctccatctccagacctcgtgatctgcctgccaggcctcctaaagtgctgagattacaggtgtgagccactgcacctggcccatgattttcttaataacatcttttctgtagcttactttattgtaagaatacagtgtgtaatacatatacaaaatatgtgttaatcaactgttgaaatgttgtaagtaaggctttcagtgaagagtacgctgtgtgcagttaagtttttgggtggttgattttggtatgtggatttttgactttacggggttggcatttctaacccccatgttgttcaaggatcaactgtcatactaaatataccagcaatcataataaatataaatagcttaacttattagttaaaataaaacttttcaaattggattaaacaattttagtttcatattatttataagagaaattattaattggttgacttaaatattgatttcagacatcatggctcaaaagtttgaaaaagaagtcgacaaaaatatgtaccaggaaaaacaaaacaaagaaaatttgagtagtgaaatttttattagatgaaattgattttaagacaaaatgcattggtgtggataaaaaagcattactagtaattagtaaaagcattcatgagaaagctacagaaattctagtctaatgatatagacttaaaatataagggaaaatgggctgggcacggtggctcatgcctgtaatcccagcacttttggaggccaaggaaggtggatcacttgaggtcaggacttcaagaccagcctggccaacaaggtgaaaccctgtctctactaaaaatgcaaaaattagctgggcatggtggtgcgtgcctgtaatcccagctactcaggaggctgatgcaggagaattgctggaacctgggaggcacaggttgcaggcagctgagattgcaccaccgcactccagtctggacggcagagtgaaactctgtctcaaaaaaaaaaaaaaaaaaaaaaacacacacacacacacatacatatattggaaaatgaacagaactctaaagaaaattaacacattcacaattatcgatgtcaatatatctgtatcagaaactactacatcaagaagacaaaggaagacttgatgtctgttcttatatatccatgaacaacctttccattgtttttttcaagcatacagaacagttatgtttactgactacaaagaccacataattgatattgtactgaatatattctttgactaccatacattaaaataggaaaccattttttaaaagtaatcaataaaaaacccctattcttttaataggtacatttccaagaagtagttaaaaaaggaatcatgtcaggaggtctgaaatacttagaatcacacaacaatcacagcaatatatgtgagatagagatttatatgctagaaaaaacaaaaagttgaaaaatcaatgaattaaacatttgactcaaaaagttagtaaaagagaaaacctaaacaaataagacattgtaataagaagaaattaaataaaaaaagaaataataaggaaggtaaacaaaagtagtgcatatatgtttaattaattaattaattattttttgaaatggagtcttgttctgtcacccaggctggagtgcagtggcagaatcttggctcactgcaacctctgccacccaggcttaagcgattctcctgcctcagcctcccaagtagccgggactacaggcatgcaccaccaggcctggctaattttttctatttttagtagagatggagtttcaccatattggtcagactagtctcaaactcctgacctcaagtgatccgcctgcctcagcctcccaaagtgctgggattataggtgtgagccatcacgcccggccagtggtgcatttttattaaaacagaacaatattcaaagaagacataaaactcaccatacatctcattctgtgccaatgttttctattaacacttttgtgcaaatccttcctgttttacgtagagagatggaacaaataaatactcatgctatgacaaagattgaggaagagaattgctgtctttccaaacatagactgaatttctgaagcaggaaatgtggtttgcaagaggcagctgggagaaaggaagactcctactctgtttcttggtcctggcatttgggcgtgggaggaatacaccaacatgagagagttgcagaagtctcagcagacacctgggtttccactgggtaggaaagaggcaaggcctttcagagaagagattgaggatatagggaagtgtgctggtcataatcaggaattccagagatcacactgacgggggttagagggcaaggagatggtgatgaattggatcagtctggagagagtacaaaatatagggaatagagttccagtgataatggatcattttagcacagttggacacctgaaagggactgtgatccacagggaggaggggtgtgacatggttgttcctggtggtcttttagagaactgataagtaatcagttgaaactgtggtcttcaaacttgaataagatgatgagggggtcttagagagagagatctttcctaaaactcaagaaggttgctggggaaggggatgaagtcagagggaggctgctctactcaccatttagtcacccttgcggtttctctttctgtattttctactaatttctggtctactgagaacacctctttttattgtttagtataattatgcactattgtatttaaatgttctcctgccaattctaggaatggggcaggaagaaaagtttgtgacttgagctcagtgtcccatctagatctgaaggcaaagcttcagtttggtccttattttcccttgactatggggttcaagttcttctttctgctgagctacttcaaaaaataatttttctccaaagttcacagttcctgattaaagccgactaagatgaacaacagagcagggcaggatatcagaaaaaaaatttaaatgaagagcgttgaattaagttacatttgtcattctatcaatcatatttcccatgtcacttctgaaatgtccgttgggcttggcctccacaagacctgcaggaagaggtttattttccctcaagacctgaatgtgctctctgtggccccagtaggagtccttacacctactgtggccaccttctttgattaaaattcatttctatatctcagatgactcaggcaggacatgcctgtgtagttttacaggtgacagtttttccgagtgctcacaaactctgtgttttacaagtacatttgttccttgcagacttttggctgcactataagctcaggctgagaaagaatagttgattctggttatcaaagctttgtctaaataaacgaggacctcactgtatctctcttggctatagagctaggtatatggacagtccatcttggagactctccaaagtgagaatagttattgaagtctaaaataaggactccttataaggaagtttcacctaagaagaaggcccccagcgttggcttagcaaataacattctagtgtagctccaggatattggagccaaatgtgattctccctgccctcaaccaaagacccagcctggtttttataggccagacataaatctgagaaagtgtttataaaatagactgggtctatctggaaggcttgaaaaacaacttttataggttcattcttaggaaatcgatttgaggatatttagaggagttgctcttgtacgaaatggaatccttctcaccttatctccccctgtccagttggggtgcatgattcattcaacaaaacagcactattaatttcaggctcctcatactcttatgggcaaggagacctgccttactgagcccaccattaaagggcagagagaacctttattaaatatttattggtggacctcaaatctcaatgcttgcctttctacctggtgacaccatttcaagtttgtattcccacttggtattccaggatcttatccataagaaattttgggctataagttcctctgaagcacattgtgctaaacctgccgattttatagttgaggaggctgatgacctgagaaaaggaccctcttctttcagtaaacaccaaaacatgatgcttgaccctttgtgggatacaaaaatacatgggtcaatgtccttgtcatcagtgattgttacttacaggtgtaagaataattgtaatatgtaattgtaatatgtgatgtgataagagctgtaaatgggctgggtgcggtggctcacacgtgtaatcccagcactttgggaggtcgagatgggcggaccacgaggtcaggagattgagatcatcctagctaacatggtgaaaccccgtctctactaaaaatacaaaaaattagccgggcgtggtggcgggcacctgtagtcccagctacttggggggctgaggcacgagaattgcttaaacctgggaggtggaggttgcagtgagctgagatcgcaccactgcactccagcctgggtgacacggtgacactctgtctcaaaaaaaaaaaaaaaaaaaagctgtaaatgaaggaaaaatacaaaatgcattttgtatttaggtagaaattagcacattttgagggggcagggtagcaggagaagcaacctggtaattattgttattttttatttcccatttttttcttttaacttttattttaggtttggggtgcatgtgcaagtttattatgtaggtaaactggtgtcacaagggtttagtgtacagattatctcatcatccaggtactaagcatagtacccaataggcttcttaaaaaatcctttccctcctcccaaccgctaccctcaagtaggccccagtagtaggccacagtgtctgttgtttccctctttgtgtccatgtgtccatgtgttctcattatttagctcccacttataataagtgagaacatgcggtttttggttttctgtttctgcattagtttgccaggggtaatggtctccagctccatccatattgctccaaatgacatgctcttgttcttttttacagctgcatgttattccacaatgtatatgtactacatttgctttatccagtctaatgctgatgggcatttaggcaacctgataattactatgatgtacttcgcatttaagggcaattgggtgaatcttgggatttttgccctctgcagatgggagttacaagtaaatctgctgtattgagaaatcctctggcatggaaaggaaacgctaggaagttcagtttggtcagagggtagaccaaagtaagaaaagaataataaataaggtgggagaaatggattgggacaagattacaggtgaaaaagaatggccaaggcatattgagcaggagctagatttcagggggctaagcagcgagtggttgatgagaataccgagacagacaatgaaaaatccttatgagtcatttgctaatagagaaaaataaagattagtaggagtttgtgggagaaaacaatgtctgcagggaataagcataggtagagagggaagttgcaatgaaactagttgcattgaaagccaggattttctgatgactggaaccctagtgagggtgcatgctctgctcctgaatgcattggtatgacaagcatttcccagaatctaaaaacctgaaggtgctatttcatctctcatgtcatcactaagaatcttgaatttagaaatctagagctgagctgatcgttatgaggctgagaattgcccccaggtgagtgggacgcttggatgatgtacagactgacacactgcacaccagggtgggctcacagctctgtactcatgcgtcatctggggacactgaggctgtgcagtgtcatgatgggaggcattcacaaggttctgcaaaatatagcgaatagccagccatttggattaccctgactctgcagatcagatcaaaggagattaagttgaagtgcatccctctttagtgaagcacttggcaaatgtctcaattcttttagagatgattttgagttttgtagaattaagtctttttttttcccccaagcatatttctcccagttttcaaaaggttggttacttgtgggaaatttaatccacatgtttatgattcacttcgactccactcctttcaaatttatctttggagcatgagttggtacttgagaagcgttttaaagttcaggactttttagaactggagagttattttgctagatgtgtctcgaaaacacatatcaaaaattttcgtaaaatcaaaactcagagtttggagggtggtctgaatgtcccaaactcccaactcttggcaatgtatttccaacagctgatctgtaggcaaaggacagtgtaagtgtgcaaggagctccttcgctgagtggtaaaggaagggtgtctgtgtttacaggagtgccatcccagtctcttaaaatattcccagagacggccaggcgtggtggctcatgcctgtaatcccagcacttcgggaggccgaggcgggcggatcacgaggtcaggagatcgagaccatcctggctaacgtggtgaaaccccgtctctactttatataaaaatttaaaaaaattagccaggcgtggtggcgggcgcctgtagtcccagctactcgggaggctgaggcaggagaatggggtgaacccgggaggcggagcttgcagtgagccgagattgtgccattgcactccagcctgggcgacagagcaagactccgtctcaaaaaaaaaaaaaaaaaaatatatatatatatatatatatatatatatatattttcccagagacagcaggcctgggaagcatcatgacatttgtgtccttcctggtaggcagtcttgctttttattacagtttcttatgcctagatccttgggctggcagaacaattctagatcacctcatgtctaatttaacctcttcattttacaggtgaaactcaaaaagattcaatgtcttgctcaaggtttcacacagtttagtgttagaatctcttcgtgtttccaccatgtccatttcatgccaataagaagaaactttgataagagttgaggtcattccactgggaccaggggtggaatggtgggcaaagtggtggaggcagtttttggtgggtggagagacattgagcacttccttccacctgctctgccctctttgagtttctttctctttcagattatctgtttgctttgggttgcttctcccctttggaagatagggtttctgcaaaaggatactgatggaatggggttcttaaagtctgacatccaaagaggtgtcacatgggaaagggtggagtactccattgtgaagtcctgttttctgcagtattatttaagggatactgggatccagctgattgctctgtaaacaaatgccttcactgctcaaatggatacatatttcctgttccagaacactaatgcttacttgatgagtcaatgggtgaccagtctaagtatgttggatccactcagtcactgcaggggaaatctattgaccttggatacacactttagcccagaacggctacacttggttatttaatttagttgtacaaaatgtgggaaatagatgcatatcagcaaaggtcttggtctttgttcagcaaggaaactagtgaaatttatgaagggtttttatcagactgaggtcaatggaacatattcacacacataccatttaaaatagcatttatttgttttataaatgattataaaagtactataatttcattgtggaaaacttgaaaaatgccaaaagtataaagaagaaaaaatgaacaaatcacttacaatttcactacttagagataactaatgttaacattgacattggagagtttcctggggtttttttagtggatttacagatttttaatatttttttacaaaacatacatttttcataggttataaactgttttattttttggtgtttttttttagttgtaaagatcagaaagagaaaaagatgtttcataagcctagtctaagaccaataaccatgggtttattgggtctctaggactcgtatgagatccagtgcattttgggccctttgcagggcctgaagcagatgaaattcatagattttttctctaaagctccccctattaatgtaactcacttattcggcctaggttgctttcctttctgtctcttacttctcctcccaccactactaaccaatctccattttctctacctggtagcttcttctcacatcataacttctcatttcttgtatttttggtttgctgtgactcacacacagccctgttctacctcatggcctctctttccacatatcatttgtctgacatttttcagttcaaacgattcagagagagaatctgatttattcagctaacgactctttttctctatttgagtacatcttgcacacaggctcggccgtaagttgctggccagttgagacaattacttctctaacccatttacgtatgggcagatgatgaggaagttcagctaacatttagcaaattatatagaagacagtaaaaatttatcccaaatcctgccactcaatagtgactactgttaatacttttgtgatttttttctttgagacggagtttcgctcttgtcacccaggctggagtgcaatggcgcaatctcggctcactgcgacctccgcctgccgggttcaagcaattctcctgcctcctactcagtctctcgagtagctgggattacaggtgactgccaccatgtatggctaatttttgtatttttagtagagatgggctttcaccatgttggtcaggctggtcttgaactcctgacctcaggtgatccacctgcctcagcctcccaaagtgctgggattacaggcatgagccatcgcacccggccagtcatttttaatgtaattatgtatgtgcctatgtgtgtatgcatgtgtgagtatatattttaaaacttgattacattttgttttttagccgaacattatagcttaaaatagtttcttatacttttagctatttttctaaaacctgacttgtagtggtgtacaatagtcaattttatgagcatagcaatactctgtttcacaatttcagtattactaggtactttctggtgtgtgccgtggaagagcctgcatcctatgtcatataatggcaacatttcctaacattggaaaaggtattccatttctaggtggccaaaaagtgccaaatatctatgatatggtcacaggtggacaatgtagttttatgataatgaggacatgtgttctgtcttttttttttttttcaaatttattttcttagaccatatgacatctattttgccatatagtgtcaggaagtaatttaaccttaaacattttttttcctaaaagtttaacttattgtcctagaaccatttattcacttaaccgttctctctcagttgatttggaatgtcgtaggattatttccttgattctcagatgcaaatgactgtgagattcatccctgacttagaaaccacagcaagttgaaattcttttttttttttttttttttttgagatggagtctccctctgtcgcccaggctggagtgcaatggcatgatctcggctcactgcaacctccaactcccgggttcaagcaattctcctgcctcagcctcctgagtagctgggattacaggtgtctgccaccatgcccagctaatttttgtatttttagtagagaggggatttcatcatgttggccaggctggtgttgaactcctgacctcgggtaatccacctgcctcggcctcccaaagtgcagggattacaggtgtgagccactgtgccggccaaaattcttgagtcacatcctgatttcagaaatattaaaatgaagacaatgtggtactaactcgtcataccaatctgggtgtttctcggctttctagtctcttgcactgacctattttgaagcatattatttatctgcttataatatttatgtttgtttatttattctcatttattcctctaccccatctccattctctttctttccagctcccataagcaactattttaacattttaaatatgcatttgtttatttgactgtatcattttgaatgtgtattatcgtgtggcctatattgttattttttttctgttgtagatctcactctgttgtcactttttagactacatcctatgtgtctgagagccattgtgttgctgtttctgatagccgggtagcactttgtggtgtgttcacagatctcatctcttcagggtttgtatcatgttatgccaggtccactaaataaattttgaggttttccacgttttgttttataatatgttggcaaactttaacatgtacagaatacatgttccttaaaagtttgaaaaatttaatctgtaaaacaatttgcctctggtgccatttggggaatagttgttaaaattccacacacacacacacacacacacacacacacacacacacaaaacaaaacaaaaaaaaaacaaaaaaaaaacaaaacaacaaaaaaaaaacaccccatcattctttctgtcatttttgatttattcaagtttttttcttcttatagggaaatttttaagaattaatatttttgagaacatatacttttcaaatctagtagcctatagttactaataatttttttatgaattcagtgtaatctcttttttatgattgtggttacattgttcatattcctaatgcttcatatttgtatttttgcactggctttttaaaaagtaacttcactttttttctgatataaaagtaatatatgcttatttaataaggggtctttagccattccctatgtgtgcaattaaccttgtccagaacttgttctattatataatttttattaaaaaaccaagttttaaaaatcaatttaaatgctttttagttttactaaatacatttaaaaaataattttatcttcgtctattccctctacctgcattttttagatttattttttgttctattttagcttattgaattggatacttcattctcatagtttctgtctgtcttgtttaataataaaatctcagtgctattaattttcctcagtatatctttggccacagcccctatattttacatgttctgttcttctttgtcataattttttaaataagctgtacttgtagtttttatttcttctttgtctcaagagttatttaagagcatttgacatttctagtgtttttaaaaaattcttctgttatgaatttctgggtttattacattgtggttagagaatgtgagaatgcagtctgcattgtttctactttttggaaaatagtaagattttctttgtggcttaatatatgaacatattttgttaatgttccacggcacttgaaaagaatacgtgtttcctgagtatatctgaagttttatatacatctattaaatcaaacatattaatgtgttattcaaattctctatatctttttctcttcctgcatacatgtgtatgtgtgtttggtctatttgaactggaaaagcctgaagatgttatatgaatgactcccactgcaactatagtttcgtcagtttcttcatgtgttgccaagttttttgctgtctctacttcattggtggaattgatgaagcatctccctacgtttcattagttgtgttctctaaaatgttgaaaggacaggcacatcaggaagcaaaaggtgtctgtattttacctagcctggtttgattggtgttgtaggggaaattttggccctattctaacattaattcaaccttggttatcattggtaggtgagttcctatttttctgtatctttgtgtcttcctttatatactcctcaatatgtatttatggaagacttcttccatctgttttcattgcacactgactatgtatttattggaaaacattttaaattttgtgtgcccctcccagtgagaggattatttgttctcacctcaaagaaatctggttctgccatgtgacttgctttggccaatagactgtgatcagaagagatgtatgccacatcgaagtgtcttgcttacagcatcattgcacagtctgtcactgtccttttctctgctctaggaaaagcatgtccaaataggggccactctctcatcctggtccctgaatgaaaacaatccagtgtgtcagccaaaactcagagagagctgactagtatggacatgcattgtgtactgggtcctgttttaggcattgcagatctaatcagaatggaaaccagcatggcccctgttcgcctaatgcttatggaaagttggaagagtctatgaaatgctgctagccactatttttacaggcctcagtcatatctgatagttttctttatatggaatctatatacttcctatttggcatttccaaaatactttttgttattgtgaatataatctttttcgtcatgttatttaagaactcgtagctgctatatgggaaatctatagatttgtatttttacttatattatctggacacattattaaggtctcataattatatagttatttactagattttccaggtatataatcatatttcaaatcaattagtaatttgcttttcctttgcaatgattataaaccaacttctcttctatatctcatttaattggccagattttcataaaagtgttaaataatgtaatagtattttccctgattttattaggaaagtggccagtgtttgactcttaagatatgacttatttgtttaagacaaatcatctttgccatgttgagaagatcattttttgtttgcagttttctctgagttcttattctgaatatgtgtagcattttaacaaatgcctttttagtgtctactgagatttttgcatgcctatctgtattttgttaatagatttcccaatattaaaatacgtcagcattcctcggataaatctagttattatgatggatggtcttttagtatacaattttgttcagttgtcgtatattttatttagcacttaaacatttgtgttcctaattggctttttctataggtttttttttgtgtgtgtgggtactatctttgtgagattttggtattaagattatacttccttgtaggagagactttaaattttattttatttttttactattcaggaacagtttatattgcatggggattatctgttccttgaaagtttgaactgacttgataataaaactgtctgggtgtacatctctttaggagtaatactttagtaatttcctcagttcctttgatggttttatttttcagatatgtattgctttagtcaggtctgtggtggctccttggactaggagttggttcagatctgagcctctcgcctaatggaagattacatcacctgatcagactggatgtttaacagaattcagcctcttgcatcgtagtatttaccttgagtgaaaatttcatgttaagcacttgttaaattgcctaaagcacagagagctgagacttcaagttgtggtctgtttttgtttctccccattagcccatatttttatgtgtgctagaatttgatttgagatgtgctttcattgtaatagatatcaggaaatgaaactggttggggtgcagcacgcctaggtccttcctagatttctaattattggaatttgctgggtattcacaaaataaactggaaattatgagcaacccaattggtctgggttggtgtgttctcaacagtccttttgctgcctatgagtggagttggcaaaggagtattctggccgcctctaaagcattccctgcacagtgaagaaagagctgccattggtagtaaccttaaggacccaagtgaattgtttttttggagctgccatagcaaagtaccacacacggggtgacttaaaacaacagaaattcatcgtctcacagttctggaggccagaagtccgagatgagataaagatgttggcagagctggtcctatcagtgggctgtgagggagaatctgttccaggcctttttcctagcatctggttgttctgatggagatcttcggtgtttcttggttgtagatgtattgcttcatattcacatgcttctcccttcttcctgcatcccttcacatcatcttccctctgtgcacatctgtctcagtgtccaaatttacccttttataaggacaacagtcattgaattagggcccaccgtaatggcctcattttaacgtggtgacttcttttaaggcccgatctccaaataagttcacaatctgaggttctaggggttacgacttccacttatcttttttcagggaatgcaattcagcacatagttctgagtagggctgccgagagaagggaagtcagaagggctttcctactgttgcttggactgatggcagcctctgttcatgcggtgaacgtgagtgggcagaccatcagctgtcttttttttttttttgtgatggagtctcgctctgttgcgaggctggaatgtagtggcgcaatctcagctcactgcaacttccgcctcctgggttcaagcgattctcctgcctcagcctcactagtagctgggactacaggtgcgcaccacccatgcccagctaaatgtttttacatttttagtagagatgggatttcaccacgttggccaggatggtctcaatctcttgacctcatgatccacccacctcggcctcccaaagtgctgggattacaggtgtgagccaccgcgcccagcccatcaactgtctttcttacccactctaccagccatctcagtagatagtcctttcaaaatctattaatggatggttccaacgttcccaatgttaactttccaagaaatcttcagctttgggattttctttgtctttaacattgttttactgggaggaggagaggggccataacaggccctgccagctaggagtcagttaaaccacaagttgttctttctcctggctctattttcctgccttttattttttccctgtccaaggatcagcaggttgcctctcccaggccacacctccaagagcatccttgcattggggtgccctgctgattgtggcagagctcgaaactagggaggcatcattcacttgggctgcaaagacaagggcttgtgcgggagaccatttgtgggtttggagctgctcttcacacttgggatatcatactgatggtctctgtgcaacctctgcagggatccccagctgtctttattgctcacaactttattatcttctgaaggtttggagcttataaaatagctgttttggccaaagctgtacaataaagaatcatatttgactctcacatttcgcctcctctcttgctagctaaataatgtgacatttcgaatttggaatcttcaagtttagcttacatttttggcttttactaattttatcaaggtcttgctgggatgcttgtcagtttccaaaatgccttgatatgatctcatcttattctcgcaataagttgctttttctgctcatttttcatggcaataactcacagaagttactggaggcacgggggcgacttggccgaaatcacacagatagcagtagagccaggactccaactcaggtctgctgacactcagcccggctcctttccatgaggtcatcctgctctcctgctacctcatggtccagccaagtctcagctcgcactcaagatcccaaaataccaccacctcctccccagagccttcccagattaagctaataactgacagctttccattatattgctcagtctatctagaacaggggctggcaaaccactggctccttgccctggtgttgctggtctacaaatgttttttacatctttaaatgtccattaaaaaaaataaaaatattgtggcagagacataagtgaccctcaaagccttatgactatttactatctgaccctttacagaaaaaggttgccagcccccaggttagataaatgtacctccctttatctgcttttaaatgtcacctactctctgctatggaatgaatggccgtcaaaattcttgtgttaaaacttaatacccattgtggtggcatgaagagttgggtccgtttgggaagtgattaagtcatgagggcagagccattaatatggatggatcagtgccgtattaaagggcaggaaggaattactgtagcttcggccttttgccaagtgaggacgcagtaacaaggcaccatcttgaaagcagagcacagccctccccagacaccaaacctgccagcgccttgatcttggacttcccagcctccagaattgtgaaaaaataaatgtctattgtgtacaagtcacccagtctcaggtatttcattatagtagcctaaatggaggaagacactgcccatttatatttattaaaccaatttttgtgtctgtttatttatttactgtgaaccgaggattattgctttggaaggttccaagttcctgcttcctctcccctgatacttttcttcacccctctatcaggctctgagggatagatagatacaacatgaaatagaacatcctctacagcttatttggaaagggaggcagggagggccttggcatcaaatacgtgttggatcctgctagatgcccacgagtggtatatacaggaagaacacatgtgcgcatcaaaggagaggacatgcttgaggactagaacgtaaaccccgcaggaatgtatcttttttgtttactgctatccccagtgttcagcataggtgcctgaaaaagatttgttgaccaatgaatgaggcctgaattacctgaggaagatttgggtaggaaattggacttcacacactaagatgtgaagaaagggtaagacttgaataaataaatgaaagcgaaggttgtcttttgggcttgttataagaagatatagcccatcgtatgtcttctttacagattcgttaccactgaaaccaatgaacagttggtgtatgtaattattgattcagcaggaaatggcaggccccctgagtggagggaccttggctttttcaccatgtaggcccacttcttagcaaagtgcctgcaatttaacagggtcttgatggttctctgttaaaaggaataatgatttataagactatgacagctgattagagccttagagtggggaatcttccatgccaggccaatcacctcgaaatttatcctttctatagtccaggggtccacaaactacaacccgtaggcccaatccacacatttgtttacctattgtccatgggtgcgcttgcattgcagttgcagaattgagtggctgagacagagatggcatgtggccccttggcctacacaggttaaaatacttgctgtctgcccccggacaggtgaagttcaccaacctgtgctgaactttggagaatggcacaggaagtctgatgctttcatgaggttggtgctgggttctcatggttggctggctgcaattgtacagcgcacaaatctactaatgccctcaggtccaactctctcatctctccttcgatccagagacttcttggggattccagtcttggcctacagttctcatgggttcagggaggcctttgattctgaggaaacatggtgagctttactggtgtctagatagctctctcacatcctgcacatttgctaagtttataatttataatgagagggatctagcaaatgatttccttggggattccccagccttctctattgctcataactctcttagcttcgaaggttagcagtttttaaaatgggatgctttggccaaagttgcataacaaagaattgcactggcctgtctgcttcctccccttctcaaggtagctgaggaatatggcattttgaaatttgagtcttcatgtttagcatatatttgcaccttttatttttttacttttattttttgagatggagactgttctgtcgcccaggctggagtgcagtggtgcaatctcagctgactgcaacctctgcctcccaggttcaagcgattctcctgcctcagcctcctgagtagctgggactacaggcacgtgccaccacgcctggctaatttttttgtagttttcatagagatggggtttcactgtgttaggcaggttggtctcaatctcctgacctcatgatccacccgcctcggcctctgaaagtgctgggattacaggcgtgagccactgtgcctggccctccaattttattaataaattatcacccaggcagcgtcttaggcaattttctggttgtccatgagacactctttaagctcagaattttaggccataaaatatagttcaaacgatgctataaagagttaagagagtttccaaagaatgttgggtagaccttgagaaactatttagctcaggcgtgcaatgtttgtgtgacttctcttgctcagctgtgcctgatactctataaatatgccttatttatcttcttcatattttcattatttaatgttcttctttaaacatacttttgggccgggcgcggtggctcacgcctgtaatcccagcactttgggaggccgaggcgggcggatcacgaggtcaggagatcgagaccatcccggctaaaacggtgaaaccccgtctctactaacaatacaaaaaattagccgggcgtagtggcgggcgcctgtagtcccagctacttgggaggcggaggcaggagaatggcgtgaacccgggaggcggagcttgcagtgagccgagatcccgccactgcactccagcctgggcgacagagcgagactccgtctcaaaaaaaaaaaaacaaaaaaaaaaaacatacttttggggctcctatattgcccagttacagctctttttaagtttttatgttccaatataacttaaaatgatttcagggcctttggtaatcaatagtgttatcaaattggggggataatatatcaaaaatgtgtgacttatccagtaggccaagtattgaagcatgggcttccatgggacagcagttattagcccatcaggagggaaaagccattgtaactttccttatgcttagggaatcctgagtctcatcttcccttatgcctgtcctactagaattctatggtttatatcataatcttcctcaagaagattgggtctttttgctcaaatttctaaaatttgaaaacttaacatccataggactgttttttaaacgtgaggattttgatttgagtggacatgggtaatggggtattttctttgggtaggatccaagagcaagacacctctaggtagggcagttgatctcattccccaaccttctgatctgaattgggctgggacgtggagctactttgactcatttgcatagtgactgagggttctacctggggatctaggggctggagattaaccctactgagttttatgggtataaaagcatttggtagattgaagtaggctcagcatgagaccagattacaggaaaaaaaaaaaaaaaaaaacaccagaggctctgaaagggaacgaaccctaaggcaagaggggatctgaaacatgaactggaaggttcagcagcggaaggaccctgttgtttctgggcataatctataactgagactagaaactccctgtttctgtttcaagcaactagaatcttctgcatctttgggactagtagagcattcatgtttggaaaaagtgacttaaccataaaataaaactctacctgaatgtcccaatatttgtgtgaccttcttactgtgtctttaacataaaacagagcaatgcagtttatttcatgaaaatacgaggtctagctaggttgagttgtatacagttctattcagaggcgcaacacgcattgtagctgatcttatttttctcttgagtccccaccactttcttcttcagtggctggaaaagaagccatattttactttccctttttgggtggttactctttttcctctcatgcttccctgcctcttattagtctcctgcagcaagataatctggtaatttaaataagcgaataaatgtatatattttatatttttctctagacacatataattaacattatatatgtactaataaacatacacatgcacatatatattaaagggttgatttttaaaaattgggataccattaaacacacttttctgcatcttgattttttcgctcaattatgcctaaatgaaaatcctgcgtcaatacaatcaatctaatttgttttctgtggttgtgtcatattccatggtgtagatggattacagtatatgaagttgttttttaatggagttgcatacacatttttcaatttctttcctcagatattgctacaataaacattcatcttataaatgaataaatcagtttccagcttggggttgaagagtgggggaaggtgtagactctagaaaatgcagagatgtagactctagagaaattctaggaataatttctccttaagttgggtaaattaagctaagtctaaaataagccagaaattaaagttccccattcaaatatcaatccattcttacaatctgatttatacttaccattaagaaactatattcattcctttgtttatttttccttttgtccatctatccatccatccatccatccactcaattatccattcatctatccaaacatgagctaaacatctgctacgacctaacactgttctaagggcaatggaagatataaaagatatatatgcttataatatagttgggaaacaagccatatctataggaatagctgtttaatggtagtggctgccaaaggttggactgagattcaggacactgaccagagtccttactctgcctttgcttacttcttgttcattccgggactgtgaagaagtcagtttaccattttaggctttggtttcctcatctgcaaaatggcagagtggacctcgatcataactgaagcatcaggggacctgcaagccaaatccaccccatagccatcttgtctagtctgtcacagttgaaaaaaccccaacatttaaaaagcagtacatttcttataaaagtatagatttttggcttctttcaaaaaacaatgggaagatttgttcacacagtatctacatgccagtcccacgaagcaaagattggctaaagctgggaaatgtttgcccacttctttttttgtttgtttttgtttgcccccttcgaacaagaaactcattctccatttcaccatagtccctactatgccctaaagttgccctcccatgtgagctgtcagtagctaattaccactgtgctcgcatggctgattcttccttggtagaaaaatgcattgcttgcatctatgtcaaaagtaggaatacgaaagatctactgagaagccttcacatttcaagaaaagtgggagagattatacagagagagacaaagtgagaaagactcttaggtgtttcaaactctaacagaaactgtgttgaaaaccacacctggaagtcccaaggctggcttttgctgagtggcagcccacccctcccccaccactgcaagcccttgtcactgcctgttagacacagcatgtcaagctgcaccagaggagagcctgtttggagccagctctgcacaggaaaaaaagacagaaggagaacaggctctgctatttagagaaacgtcctttctcctgcaaagactgtcttggaaggcttatggtctctgatttctatatggtttttggcacatcgttttaatcaaaagaagaaaaggaaacaccgcgatgccttcaaactctaaacacaatgagctggcaatggaggatgcagttaagtcattccaataatatgccaggctccgaataacaacatctgttcctgcagggcagctagcagaggataaaaaacaagaaagaaaccttagattttaatgcaaatagattcactgacaggcggcatggaacatctttctattagacgggtcagagttactgtcaatagcatgtctttgcctaattgtaggctgcctggggctaggtgcaatggtgagtgagttggagagaaatgacctctgacctccatagtttaaaatccacgtacagaaacactttgatgcattacaaagtgccatgcacaactattatatatcaatattttaaaaaagggccatggccctggtgggaggtcatcaaaccctaaaagattcccttggcttcatttaggagaggttctgaattcccctgtaataagtagatccacagacatttgccctgggtatcagtgcagcagacagctctaaagcactccctttcctggtaatttttcaattcttctgagtccttccgagagagatcctcaattaggtgttaatgattaatgtctaatttccctcacaccctagggcaaacctttctgcttccaaaaaatctaggattgtagaagtgacaaatttgatatcataagatcttcccatgaccattctccgaaccccttctgtgctcctctaacttacaccacaagtttcaacttcctagattcaaacccaagatacgccagaatcttggccattttgtgtgttttcctttttctttctttcttttttttttttttgagacggagtctcgctctgtcacccaggctggagtgcagtggtgtgatctcggctcactgcaacctctgcctcccgggttcaagcaattctcctgccttagcctcccaagtagctgaaagtacaggctcatgccatcacgcccaacttttttgtattttaatagagacggggtttcaccatgttgctcaggctggtcgcgaactcccgagctcaggcaatcagcccccctcggcctcccaaagtgctgggattacaggcgtaatcccactgcacccagcccattttgtgttttaaccatcatctcttcccagaacacttaccctctaatatatgtcattcatccctctacctggatcacctgtgtaactcctgcatattctttaagggtcactaaaaggtcaccctctcgctaggactcaggcccccttctcagactcaggtaagttcctctcctatgccttcctttggcgcttgctgtttgtgtgtgtctgtacacgtaatacatggcagcatagaaagtaaagtcttccaccatctaactgtgatagataccatttaaaggttaatgaaaaatatgcaatcatttgttcagcatttactggttggtttgtttctgatatttgctttaggggcaagtaataaaaaaccagatttcctctctgtcctcagtggataggggagaaaagccacatcccccactcatcacaggatcacaggcattctattgcccagtgcagcctaaaccacaacatattgaaaatgaattaattgacctagtaagtcaggaacctttgttaatttcttcggcatcattaatgcttcccttcctagtctttagtttcttgtaaaatgagggatccctagatcccttttaactctcggagtctgaattcttgaatcactcttctagttgtcctccacatctaacatctgggcagatttctgcacattttccctacttatggtagaaaggttttgctgcttctgtacatggcttggtcaagggtctaaactcaaactactccgtttaacatcgaaagtgcctttcctttcccaaatagtgtgtgctttggtgttaagcaaacctagatttgaattgtgtctttcactgtagttaactaggtgacctcaggtgagtttcttaatctctctatgcctcagtttcctcattggcaaaatggagataactccacacaagtcacggagttgttgaaattatcaaataagataaagcaaatccttagtacgatacttagtacatgggtagtgcttactaaatgtcagctttttattaattattgtgacccctcacttattcacttgatatgaaacaatggctttattagtagtataactgtgtcatgtaaaaatattttagcataaatattgtgatatgtaagagtgagttatttctatttgacttcttaggggctattagcctgtgaaatattctagtatgaattaatactaggtttgtcaaattactataaaaatagaagtagttttagagtgatgatattaatggtgtttaagttatatgattaaggagaagcagtacaacagtgtccaccaatcttgcacaaataaggtagaaggaactagctaactctgaagtctatgccagtcctgccagttgtgcagcactggccctacacctgtctatatcaatggcggccctgctaccttccctgcctacctgggcctgtgaacacttcttcatcctcttccaagggagcttgttctgcaagggactggttgggggcacctgagactgcctttcccaagctacggaaacttacggtttatgcctgcttgctaatagagatgtcacattttgtctgagacttgattagaactggtagtaaggttgcagggaatggaaagattatatcactttctccaaccaccagcctgtataacaaggatctatcatccctggatgccagattggcttagattggttgcttcaccaagcgtttcccccataccttgcccagcacttgctaattcttttctcaaccagttcttttggttctcacctttcttaagtcttaggtggaaattttagcttacataagttttctttatttgctctataaatagccaagtatcatactgatgggaggtaccttatgctgtcattaaaattaagagcttaataatttttgaaaaccatactgcagatattacacatgatttactgactttaaaattaataaaagtaatatttacactatacatttgttggaaataccaagattccatgttgcatttaaaaaaattctattatagtagaaataaaaagaagagatttccccccccaccttgtaaggatctgtttgaattaattgtaactcataaataaatgctatttcttacctcaaacaggtaaacaaatatagaatgagggataatgaaaatataacaagcaaccattgtacagtagttaaagtagaatttcacaggaaagtttcttgtaaacaaactactgaattttatgatgacaagacacagaataaagtataaatatggcaagaaagagccttcacaggacttggcttactgtttaaattctttgtaagttcaaggtgaatgtcttgcctttaccattatctatgtaacaaggcaaaatggctcagtacgttatattttcggagcttcatgccaaaatagctccacctttctcaatcttctggtattataaatttggtggcctttggcatcaattttaactttaatggtgctaagttaaagaatttgtatcctgtaacttaacggtctatatttttcagtaacaaagtgcattttacaaagtaatgtccatcttccacgttcctcctcttccctacccccatctcctactccaagtgaggcttcccaaacctccctgggagcaggggctgagaccagggtagttttttcctctatgtgtttataaactttgcattctcttgcctgttgtggaagtcacaatttcgagcactgactgtttctgggtcttctcattttcatacctatactgctactttcctcaagggaaataggagtgtgtagaaaggagggcaccaagatgactatttcaagattttctcctgcaatgcacctcgtctcatgtaatcctcataaccacaatgggtgtggcatattacccagtattatctgcatttcatagctgaagatgctgaggttcagagaagctgcatggcctacataacagtgacaatattcactcctaccacaattttcttccatatacacattgcacaggagccagcaagccaggcccagcgtgagcctccgtcttcagtttctgaatcccatgcatctttattctatctcaccgcagaaatgaatcagagaaggtgtgatggttaatactgatgtcagcttgactggattgaaggatacaaagtattgatcctggctgtgcctgtgagggcgttgccaaaggagattaacatttgatcagttggctgggaaatgcagacccaccctgggtctgggtgggcacaatctaatcagctgccagcacagctagaatataaaaaggcagaaaaatgtgaaaagagagactggcctagtttcccagcctacatctttctcccgtgctcatgcttcctgccctcgaacgtcggactccaggttcttcagttttggaactcggactggctctccttgctcctcagcctgcagacggctgggaccttgtgatcctgtgagttaataataaacatatatatatatatatatatatatctcccattagttctgtccctctagagaacctgactaatacagaatggcacactgtggaatggggatttttaccagaagctaggatccaccgatcttctatgaccggggagccatgtaaatgccatttgggaaaacatatatctactcgggaggctgaggcaggagaatggcgtgaacccgggaggcggagcttgcagtgagccgagatcgcaccactgcacttcagcctgggcgacagagtgagacgccatctcaaaacaaacaaacaaagaacgtgaacaacggatacaacaaatcaccaaaaggatcagggaatctagacacagactagaaatttatttcacgtgaagcccagctaatatcatggtgatagctctcagacttcaggggaggatgagttttcggaggctctttcttcaaggccctccctgttagcctctccgttttgcagccttccccatccttctctttctccttatgtttctgaagcctgctattctagcgtctttgcctttgctagtcagcaagcccaggattttgttttttcaagcgtctagtatttttgatcgtcatcacaaactcttccagggctctgaatacaacgttttaaaatagcctccagcatccctgggggttattaactgacagtgtgacagtttagtcaccctgcacccctccccatgcctacaaattttttcacagttctattttcaaacaataaataactatgtggtgagcatctttcctgtagtatcctattccatggagaggctgtagatatgtctgtcttttgggcaagctgggaagaaagtgggctgaggtaattgagtttaaaatgagttggctgcggtctttttttttaattgtagtaaaacgtgtagcataaaattgaccattttcataatttattttttaaatttttatatttttggagacgagtcttgctctgtcgcccaggctggagtgcagtggcgtgatctcggctcactgcaagctccgcctcccgggtcacgccattctccttctcggtctccagagtagctgggactacaggcgcctgccactacgcccggcaaatttttttgtatttttagtagagacggggtttcaccatgttagccaggatggtctcgatctccttaccttgtgatccgcctgcctcggcctcccaaagtgctgggattacaggcgtgagccactggcctggcccattttcatcatttttaagggtgcagttcagaggcatgaagttcattcacattgtctggcaaccatcaccaccatccatcttcagatctccagagtaagttgtgttttaggagggcctggccccctgagataaaaagtgggactgaattagtctgctaaagttcccataacaaaataccacagactgtgtggcttaaacaacagccatttatttctcacagttctggaggctgggaagtccaagatcaaggtgtgagcaaggtagatttcatcctgaagctccttctcttggcttgtaggctgcgccatcttgctgtgtgttcctatcatctccttttttgtgtgcctgtgaagagaagcagcaagttctctggtgtctcttctgataagggcaccagtcccatcacatgagggccccatcctcataacctcaattaaccctaattacctccctgaagccccatctccaaataccatcagatttgaggaactggaggttaggaattcaacaaacgaattttggggagacataaacattcaggccctaacagtgatttatctgatgattatgaaggactcattagaaaccactgggactggcagagtcccaatgacgttgacagaaaaacattgcataactaggaatggagctgttccaggggagaagaagtagaccagcaggtgttgggaaagaaacagttgagaagcacaggcagcccctcaatccacactggtccttctgaaagacatggaataaataaagcacccagcaaattaagagtcagccgatgctctgtggggacactaaagtggccatgtgtagactacatcacattttagtgcccagatgctgaaagcttctctgctgaaaattgacccagagaaggaaaaatagggaatccacaacaaaatatgactagaagtcaaacagtaattttgcaagcatgaatttaataagaaacacagagcacttattatattgtagatttccatttttttaatgctttttgaagtttctattatttagtataatagtatactcagatttaactattgtttgggcatatatccacccaaacatctttgtttatttatatttttggcagctgttttcatgcattactttatatttaatacatgtacatggcacataattccaaaggtacaaaagggtacacagcaaaatataacactcctttccatcctgaccctccagccacccaaagacagctcttatttccagcttcttatgtgtgctttgtgtgtgtgtgtgtacatgcacgtgcataaggaaaatttttacccaaatagcacatgatattacccaaatatacacatggttctgcaccttgcttgttaccctgttatatcttggaattcatttcatatcaatatgtatacaactgcttcattttctgaaacagctttagagtattccattgtttgtatgaaccagaatttatttttttttgggtctcttttgtttattgtctgcccctcaccaaaggtttcttccatgaaaagaggaaggattttgttgtgcttcctgctgtatctttagcaattataacaatgcctgataaacacataaatatttgtactctggggtgttgactgactacataatttcacacctgagtaatttgaattgctggaacgaggggaatgtgtagttgtcattgtgttaggatccatactgccctccatggaggctgtaccaatgtattctaccaccactaaggttggagtatatctgttttcccacacctgtgccaatacctatggtaacacccatgcctaccaacatagcatgctgccaaggttcattttttcctgtctgatagaggagaaatggtatcttaagattttatatttctgcatttatttttctttatgtttttgcattttttattataattgagttgcacatgtttaaaagcatttgtattttctcatccatgatttgtgtgtgtcgttcattgagaaagggatttctccctttgtctgagacatgtttcaacagttttgccccagcatgtcatgtcatttgaggttgcctgtagccccattcagaacttctgacatgtatgttttagagcttttcattttgatgaagtcaaatttatcaatcttttcttttggggcttcttggcttttgggagggggatggtcataattagaaaagtctttctcagtgtaggattatttaaaaaaatgttcgcatgtgttctttagtactttttctagtttgtcaaagtttaaatctgtgatacctaaatttattttagtattgggagtgaggtagggatcttttttctctttccctaattggttatgaataccacttggtgaatggccagttttctttttcactgacttgttgtgttatctttattatttatgaaactcccaaatatttgggggtttattggtggactcctttatattttccattgatttattgtctattcaatcatgagtgtcacatcattgcaattactgcagcttttaatattttttcagtgtggtagtactggctcccatttttccttatttcataaatgccccaaatatcattggatgtttatttatctatatacattttagaataaatttctctattgttttgaaaacctatttgtaacatctgcaattactatagattagaaatatttgaaatctttataatatttagtattcttattcaataactttcttttttaatggaaatttaatttattgtagaggtgacattactaatcattaggaaaagtgatgggtgacagaatatgtgaagctggtacaattgcttatccctgtaaaattaagtttattatctcacattatagataaaataaatgtcttcctggggcattaaaatataaatgttaagagcaaaactttaaaaatttgagactaaaatgtaagagaatatctttatgatatcaaaataggaaagggtttctttttttttaaagttcagatctccttttttattattattattaaagttttagggtacatgtgcacaatgtgcaggttagttacatatgcatacatgtgccatgctggtgtgctgcacccattaactcatcatttagcattaggtatatctcctaatgctatccctcccccctgcccccaccccacaacagtcccgagtgtgatgttccccttcctgtgtccatgtgttctcattgttcaattcccatctgtgagtgagaacatgtggtgtttggttttttgtccttgagatagtttactgagaatgatgatttccaatttcatccatgtccctacaaaggacatgaactcatcttttttttagggctgcatagtattctgtggtgtatatgtgccacattttcttaatccagtctatcattgttggacatttgggttggttccaagtctttgctattgtgaatagtgccgcaataaacatacgtgtgcatgtgtctttatagcagcatgatttatagtcctttgggtatatacccagtaatgggacggctgggtcaaatggtatttctagttctagatccctgaggaatcgccacactgacttccacaatggttgaactagtttacagtcccaccaacagtgtaaaagtgttcctatttctctgcatcctctccagcacccgttgtttcctgactttttaatgattgccatcctaactggtgtgagatggtatctcactgtggttttgatttgcatttctctgatggccagtgatgatgagcattttttcatgtgtcttttggctgcataaatgtcttcttttgaaaagtgtctgttcatatcctttgcccactttttgatggggttgtttgtttttttcttgtaaatttgtttgagttcattgtagattctggatattagccccttgtcagatctccttttttcttaaataatcttaaaaaatttttttcaatcatgggtttttttaaaaacttgatcagtttaactttaaatttttcttgagatatattttgcagattttcataactttttagtcagtttattctttttgttgctgttgtaagtgaaataatttttctattgtattttctaacttcctgtggtttttatataaaaggctattatttacatttttactatttataatagttttaaggctaattcttctgagttttataggcgtacaattatataatttgtaaataatgagattacttccttctttctatgttttataacctttttattcctttgtcatatgtaattgattcagttagtatctctatgttaaattaaataatgacagtattagcagacatccttattttgttcctttttttaatggtagagttattagtgtgtttccattaagtgtactattggcctatggatagatatatagctttatctatttctattccatttagttttttatttggtcaataacagatattgaatattattattaatagatggcttctaagtatctttgaagaagctctcatgatctttcactatcaaataaaatacattaatcaatttctgatatcaaattatcttttgattattcttgattataattcctgatattacttgaacttggacattgattttgaatatgcctttgtagtctcacatcttatgtaagctttttttaacatcaatatttacaagtgaaatttacctattttagtaatgtttagttttcaagtgtctggcttcataaaaagaattggaaattttacttatttttcatgccttgaacaattaaaatagaattggaattaaaccttaaaggtttgacacagttattttgtgaaattatctggaatattttattatggaaagcaggttttatttattaactgtatctgtgatttctattacaattgttccattttgattttctttgtcagtcagagcaatcttgtaaatggcaaaattggatactgctctttccttccttctttttttccttccttccttttttccttccttcctccctccctcctttctttctttctttctttctttctttctttctttctttctttctttctttctttccttctttcttttcttctttctttctttctttctttttctttctttctctctttctttcttctttttctttctttctcttacctttttaaggcagtttattctttttgttgctattgtaaagtgaaataattttccattgtattttctaacttcttgtggtttttatataaaaggatatgattaatttcttaatttgtttctcctccctccttctctctctctctttcatctttctatcttcattcttcctcccctccgctccactctgctcccctcccctctcctctcctctgcttttctttccttttcctttcctttccttttatttacttttcctttcttttcttttctttttctttccttctttccttttttgacagggtcgcactctgttgcccaggctggagtgcagtggtgcaaacatgactcactgcagcctggaccttccaggttcaggcgaccctcctgccttggcctcctaaattgttgggattataggcatgagccactgcactcagcctcttccttccttgagagcattagtttttcatatctttaggctctgaagttcaaggtaaaattggaactctttccttgggtttactaggctttcgcagttcatttccatctctccagattcacctcctgctgcatttccaccaacattctacttcatgatgtgcttctcccacaagttacttcttctacttcttctgtggtcatatttggtcattcctacttttctattaaaacaatatgtcatctggcttcttaagtatatttgcatagtgctgaggatggtttcttattctctttattttctctgcatttgtgcatatttctgtatttaatttcttattttgtgtatttacatgctttttttcccaattagggtagataatatctctttttgccttattttttaaaaaaccacttttgttatttatttatttatttatttatttattttactttttattcttttttgagacagtttccctctgtcacccagactggagtgcaatggcgtgatcttggctcactacaacttccgcttcctgggctcaagcgattctcaatctcctgagtagctggcattacaggcatgttccaccatgcccaactagtttttgtgtttgtagtagagatggggtttcattgtgttggccaggctggtcttgaactcctgacctaaagtgatccgcccacttcggcctctcaaagtactgggattacaggcatgagccactgtgcctggccagaaaccatttttgaatttatctattttacaatttttccctttattctatttttctacttatttcccctgacttagctaatttcttatttctgttaataaagttaattttgttgtttgtttctagcttctggagttaaatctttaatatatttaatttttaaaagcttacatttttataagtagtaaggttatgatttttcccctgagcactgtttaagttataaccaacaggttttgatggcagatgtctttattgctgttaacttctatgatctatacttttagtttgggtgactcttagacccaagagctgtttagaacttttttcaacttttattttaggtacaggtacatgtgtagatttgttacaagaaaacattgtgtgatgctgagtttggagtacagatccatttaccttgatagtgagcatagcacctgataaatatctttttaacccccctcccatgctatagtagtctatagtgtctgttcttcccatatttatgtctatgagtgcttaatgcttagctcctacttttaagtgagaatacgtggtatttggttttctcttcctgtgttggtttgttcaggataatggcctccagctctactcatgttgttgcaaaggacaagatctatttggtttttatggctgcaccatattccatggtttatatgtaccacattttctttatccagtctaccattgataggcatttacattgattccatgtctttgctattgtgaatagtgctgccatgaatatacgtgtgtatgtgtctttattattagataggatggtttatatttctttgggtatatacccaataatgggattgctgagtcagatggtaattctgtttttagttctttgagatgtctccacattgctttctacaatggctgagctaatttacactcccaccagcagtgtataagcattgctttttctccacagccttgccagcatctgttattttttgattttttaataatagccattatgactaatatgagatggtacctaattttggttttgatttgtatttctctaatgatgagtgatgtcaaacattttttcatatgcttgtttgctgcatgtatttcttcttttgaaaattgtctgttcacgtcctttgcccacattttaatgcagttatttgttttttgcttgttaatttgtttaaattccttatagattctggatattagattgttgttggatgcatagtttgcaaatattttctctcattctgtaggttgtctttttactctgttgatagtttcttttgctgtaaagaaactctttagtttaattagatcctatttgttaatttttgttttcgttgtaattgcttttggtgtctttgtcatgaaatcttagtcagggcctacatccagaatggtattccctaggttatattccagggtttttatagtattaggttttacatttaagcctttaatgcatcttaagttgatttttttgtatatggtgtaaggaagcagtccagtttcagtcttctgcatttgactagccggttatcccagcaccacttattgaatagaaagtcctttctctagtgcttgtttttgtcaactttgtcagacaccagatggttgtaggtatgtggcagtatgtctgggatctctattgtgttccattggtctgtgtctgttttggttactatgctgttttggttactgtagccttgtaatttagtttgaagtctggtaacatgatgcctccagattgtaatttagtttgaagtctggtaacatgatgcctccagctttgttctttttacttaatattgccttggctattcgagctccatatttttttattccatatgaattttaaaatagttttcttgaattatgtgaagaatgtcattggtagtttgataagaatagcactaaatctgtaaattactttgggcactatggtcattttaacaatattgattcctcctatccataagcatggaatgttttttgtatcatgctgtttgtgtcatctctgctttctatgagcaatgtttttttatttctcattgtagagatctttcacctcccttgttagctttattcctagttattttcttcttttgtggctattgtgaatgggattgcattgtgatttggctctgcacttggacgttgttggtgtatagaaatgctactgatttttgtacattgattttgtattttgaaactgctgaagttgtttatcagatctaggagcctttggcagagactatggggttttctaggacagaatcatattatctgctgtaaagagatagtttcacttccttccttccaatttggatgaattttctttctcttgcctgattgctctggctaggacttacagtactgtattgaataggaatagtgagagtgggcgtccttgtcttattctcattctcaaggggaatgcttccagcttttgtccattcagtgcaatgttggctgtgggtttgttacagatggctcttattattttgaggtatgcctaagtttgttgaggatttttaacatgaaaggatgttgacttttattgaaagccttttctgtatctattgagatgatcatatggtttttgtttttagtttttttctatgtgatgaatcacatttattgatttgcatatgttgatccaaacttgcatctcaggaataaagcccacttgatggtgatgtattagcttttagatgtactactggattcggtttgctagtatttttttgaggatttttgcatctatgttcatcaagaatattgtcctgaagttttattttttgttgttgtgtctcttccaggctttggtatcaggatgatgctgacctcatagaatgagttaaggaggatccctcctcctcaactttttggaacagtttcactaagaacagggctaggtcttttttatacatctggtagaatttggctgtgaatttgtctggtcctggcctttttctggtttgtagactttttattactgatgcaattttggaactcattattggtttgttcagtgattcaatttcttcctggtttaatcttgggagtatccaggaatttttccatttcttctagattttctagtttgtgggtgtagtctcttagggtttttggtatttctgaggggttagtggtaatgtctcccttgtcatttctgatgtgtctatttagatcttctctctttttttctttatcagtctagctagtagtctgtcgatcttatttattctttaagaaaacaaactcctggattcattgatattttgtatttttttttgcatgtcaattttcttcagttcagctttgattttggttatttcttatcttctgctaactttggcattgctttgctcttgtttctctagttcttctaggtgtgatgttaggttgttaatatgagatctttctttctgatgtggccatttagcactgtgaacttccctgttaacacagctttagttgtgtcccagatattctggtatgttgtatctttgttgtcattagtttcaaagaatttcttgatttctgccttaatttcactgcttatccaaaagttattcagaagcagattgcttaatttcatgtaactatgattttgaacaattttcttaatattgagttctatttttattgtgctggggtccaagactgtgtttggtatgattacagtttttaaaaaatttgctgaggattgttttacagttcattatgtggtcagttttacagtatatgccacgtgtgatgagaagaatatatattctgttgttttggggtgaagagttctgtggatttctattgggtcctttcggtcaagtgtcaaattcaggtcccaaatatccttgttaattttctgcctcagtgttctgtctaatactgtcaatggggtgttaaagacttcaactatgattatatggttatctaagtctctctattggtctctaagaacttgctttatgaatcttggtgttcatgtgttgggtacatttatattttggacagttaagttattgggtatacatatatctagaacagttcttgttgaattgaaccttttgctattatgtaatgcccttctttgtctttttttaaatcattgtttttttaaagtctgttttgtctgaaatcagaatagcaacacatgctttttctgttttccatttgcttggtagaattttctccattcctttactttgagcctgtgggtgtcattgtgtgtgagctgggtctcttgaaggcagcatacagttgagtcttgtttctttatccagcttactactctgtaccttttaactgggggcatttagcctctttacattcaaggttaatattgatatgggtggatttgattctgtcatcatgttgttagctggttatgcagacttgaatgtgtggttgctttatagtgtcaatggtctatgtacttaagtgtgtttttgtgatggccagtaatgtctttcctgtccctgtttaacattcccttaaggacttcttataaggtgggtctcttggtaaaaaattcctttagcatttgcttatctgaaaaggatcttgtttctccttcacttgtaaagcttagtttggctggatatgaaattcttcattggaagttctgttttgttttttttttttttaagaatgttgaatataggcccccaatctcttctcgcttgtagggtttttgctgaaagattcattattagcctgttgggatttcctgtgtaggtgacctgccccttctctctagttgtctttaacattttcttctttcattttaaccttgaagaatctgatgaatatgtgtcttggggatggttgtcttgtatagtatctcacaggtgttctctgcatttcctgaatttgaacattgccctctctagtgaggttggggaaatccttatggatgatatccttaaacatgttttccaggtggtttgctttttctccctctctttcagggatcccagagagacatagaattggttgttttacataactccatattctttggaggctttgtttattcttctttattctttcttctttatttttgtctgactgagttattttggagaaccattatttgagctctgagattctttccttagcttggtcaattctggtgttaatatttgtgatattattattaaattcttgaagtgggtttttttttttagctcaatcagatcagttctttcttaaaatggccattttgcttttatctcttgtatcattttcttgtattccttagattccttgggttaggttttgaatttctcctgaatgtcagtgatcttcattcctatccatattctgaattctacttttgtcatttcagcaatttcagcctcgttaagaaccattactggggaactagcatagttgtttggaggtaagaagaaactgttactttctgagttgctagagttcttgcactggttttttctcagctatatgggctgatgttccttcagtcttagaagttgttgtcctttggaattttttttttttttgattttttgcttttatcttctttgattcccttgggggtttgattgcggtataaggtgggttcagttgactggatgtgtttctgggagattttagggggtcacggctcagctctacactattggtctgcatcctgtaactctgggaagctgatatccggcccccagctttgttctctggcctctggaggttaggaacctgctgtgctgaagggactgaggcactctgggtctgctggccacccactctattgggtggtaccagccaaagcactttgttgggggtggtagcagccagatctgtgcttcctcgtgtgtgtcagcacaacggggtgcatgtgttggctggggtggggtaccatcagaagtggggttgcagcattcctgtgcacactcaggctggtagtgggtctcaggcaggggtagggttgctggtgtctgtgttcgcactcacaccagtggcagcagcaggagggtggagtgctgacgggtgctgggctgctggtctttgcatgtgcttttgcactggtggtggtgggagtgtgggggatgggtggggcagctggcatccaagtacttgctcgtttgcactggcaatgatggcagcactgggaggtagggggtgatggagggagggacagggtcactggcatctgtaacattttttatatgctaatagctactataagctccatgagctccctgttcactcccatatcccaatatttgggatttgttaaataaatgcttcttggtggcttgcatttcttcttagctaaaattcatattcatggtcttgctcagtcttgtctattggttatattacaacatcctgtttttcccatctagtatgtttgctataatttttttgcttattattattacttattaattttcggtaatttgtgatacccagaagtttaatttgtgatacacagtttttttttcaggcagtcataatttctttcacagtttttttcctttcattttgtgctcagtctttcagtaccttgagatcagatgaatattcaccaatattttttctttttgttttaaggtttatgtctgactctaaatcttctgtaatttatatcaagggtatcctttgtcatcagaactctaagttttaaaatatattttattatttgaaaaattattttttggtgagagctgtgatgagactgtgaagtggaatatactcagtttttttttccatttaatattttccaaagtaacctatgactaaacaattcaattctggcactaacaaaaaaaagaaccagcatgttagacaaaattgtcggacaaattaaatagaacaccaaactagcttcatctagtgaaatttgaaaatctctcactgaagacttggaaaatgggttatattttggaaattatcacaaaaatggatttcaccatttgcttgtgagacagaataaaaataaaccaggttccagattcagcccagcaaccttcacatatggctttaagctaattaaatatttttcttgacaactgaactaaaactaagaagctaagtaataattatactcattggtcttcctacattatggctttaatcagcattttgttttagttttaatacacatgaaatgggactcaaaataaatgactcttttttgaaccaagtgattgttgttccattcaatgctgccactcatcctcataaaactgccatcattggggacatctctcaaagttgtcttgtaaaattgccttcaggactgacaatacattccatttgcagtcctcagtatacttccagagaggatataagttttgacaacagtctagagaaatctggattaaagtttggagcatatgtttgctgggtatgcttgattaataaaaaatgagactacaatgttgtatcacttacaacattgtgttcagcttcaaataatagaaaaatccacttatggtagcttaaaaaatgaattaatttttctaacatattaagaagtacaaggcttgtgacatgggtataagttgctcagtgatgtcagggctcacattgctgcaattcttttgtcttttactcatgactgctgcctcagggtcataaggtgactggtctacttccaggcatcacttctatatccatggaagaaagggaaagagcaaagaacatggccagtgttttccccgtttattagggcaaccaatgattgctccagtgtcactggtcaaaactgggtcacactgccatcccatcagcaagggcactgggaaagctgggaataggcttgtcattattgccttggaccaagcataatccatagcttggattggagcacagtgctttcccagacaaaatggggctctgacgacaaagatgagatgggaatggggtggtcaccaactgtgtttgtcacaagtatgaatggttgtagactggctctgaagacagttctaaaaaacagttgcaaagtaaactgtggatgtctctttagattttttgaagaatacattgatttggtcatgtgtgctctgtcactttattagaaaaataatagtagtactttcattcacactttccatatatgttttgttagtattttggttttgtatttcttattaggttgcatttttccttaagataagggctgtgtttattttttatactactatgtatttagaattccatgtaatttctgggcactagggacatgtctatttagtgattaaatgtaagtcaatcaattgaattccacatttattaatgactgaactaaaactaagaagctaagtaatggttgtactcattggtcttcctatattatggctttaatcagcattttgttttagttttaatacacatgaaatgggactcaaaataaatgactcttttgtgaaccaagtgagtgttgttccattcaatgctgccactcatcctcataaaactgccatcattggggacatctctcaaagttgccttgtaaaattgccttcagggctgatgatacattctatttgcggtcctcaataaacttctagagaggttataagttttgacaacagtctaaagaaatctggattaaagcttggaccatatggtccaaaatgcaacatgctatgcttgatatcttacacattcatggacagttacacatgtaacatgcatgattgctaggggacttatcccaactcaggacatgccaggatgttcttagcaatagggtttggctaaaagtctaaggattgatcagaaaactctgaaatcatagaagcctcagaaatactcaaaagctaactttattagtgcttttgactaaatattgaacaaagaatgagaagtatactagctagaacccttcagctttatctcaataaggagatgttccagattcctgcttttgacatttatttttgtagtgttgtgcttcagagtatgaataatccagggagttatacaggtgtacaaacaagcatgtgtattcccatgcccagaaaaatgaagtttagggttggatagcatgagatttgtgtggtagaagttcccgagttaagttaattcctgagaaaagaaacaaggtaaatagatggtagacttgggagcataaattattaaacatgggttttaggcaattgcacagagatcctcccttagcaacattaaatgataagagaactaaagaacagtaggactctgtgctataaaagtccagaaaattggtgaatgatccaggattcttttctcacaaaatggcaggtaacccaatccaaactactcttgtaaaagaagtaattaattggctcacataattggtaaggccagggtccagctggatgcagaggtgcaaatatcttcattagaattggattctcatagtctctaacttggttctgttttccttgctatattggttgcttatcacctaggttgtttttttttttcatgggaacaagatggttgtctcaaatcctggtgtcgcattctttgagcctcatatctacaaggaaaagaagcagctttctctcccaacagtgaaaccaatgcccagagcctggcttattgatctgagtagggtcacatggcattgtatcaccaattcctcccagtggtcaggaggtaggacatactggttagtttcatccaccagtatccactcaagccccaggactatcagtaaccctcacactcttttctttccaaatcatgtcagaatatctgctgctatacaccttctgcagtatgcctagaacagtggatctcaaagcgggctccttggaccagcaatatcagcatcacctgggaacttgcaagaaataatattttttggccccaccccaggcctgcaaagtcagaaaacctagggatgtgactctctgtgtgctttctcaaatctcaaatctcaaatttctcgaatgtttctggtgcacattaaagtttgagaaccatcagctcggagaaacagactccttatgagaaagaggactcgtttaagggcagaatacattttcatagcaataatggcagttcagccaaaggtcaaattagataaacttctagaactatcaaatgccagaaaaagagagaggagaaaaataactgcaagagagattgttgtgtgctgtcttgagtatggctattttgaccctgaaaaaatgcaaatgcatttttgttcccttagcacacgctttgcagtccagtaataatgcattgtaaacagaccatattaaaacaaacagttctctctagatcttttttcaatattttctctaaatagttatttggtaatacacatttttctgttttgtagagtccctaaatagcagaggtttcagttcagaagagccaactcgtgcctccgagtgccagaatgttcatggagttttctttttactaaataaagaactggagctaatgtcgaccctgtggtggcaccgggccctcaacccagtaggaaaaataaggaactcctagttctcttcccttcctcaacccagagctggtcttagactaaatggcgccgaaagggaatcacatcctctggtttcccatttcttcctttctaggcatttgtctttagaatgcttggattgatggactttgtcacaaaattggacacatgtttttaaacatcaggtgacaatgccttcatttatgtcacatagctaacaaattctcctaaagttaaggttttcctgactgggtatggcggctcatgcctgtaatcccagtgatttgggaggctaagaaaggagaattgcttgggcccaggagttcaagaccagcctgaggcaacgtagcaagatcccatctcaacaaaaaatgcaaaaactagccaggtgtggtgacatgcgcctgtggtcccaactacttgggaggctgaagcaggaggatctctttaagtgatccaagagttcaaggctgcagtgagctgttatcacgccattgcactccagtctgggcaacagagcaaaaccctgtctcaaaaaaaacccaaccaaccaaccaaccaaaaaacaaaaacaaaacaaaacaaaacaaaaaacaaaaaaaatcagctttccaacataacacttacctgaaaggttaatattaaaaagataattttaacagaagctgacagtgttctgaaattaactgtattatttgacaccagatcactagctttggtgatttgttcttcatgtttattcctatagcagctttcattagctgcctgttaacccctcatttcctttgtcttggaagtgggaccaccaggtccctatgacttacgggcttttgcactctgggcctcacagatccatgatcttagaggtagagaggactttggcaactgatcattacctgctgatttcctctgaggcagactctgtgccaaaaagccacatgatcacttaggattctagtcatagagaaggaggccctctctcatccatggtttctgggggcttgtatttcctatctgtgcctcaaagcacttcttgaaggatattctctgccattagaactatcctgagttccccttcccctgcctgtcagatgtagtattctgcaagagtttgcttagtgtttaagcatgtgggctctggagacaacagatgttctaatccctaccaggctgcttgctggctgtgctacttgggtaggtaattaacctctctgatcttgactgtaaaatgagtattataatagcacaagagggttatggtgagcaagagaggaatgaatagacataaactgcttagactcatggctggcgcatggtgagcactcaacagaagcattagcaattgtttgtacctccctgtagttgtgcttttctctctctgcctcatatcccgagttggaaacatgactcatgctcccctacgggatgggaaggatcgtgtcaagggcaggagctgtatctactcatccttcagcatctaaacctcagcatggcatcttgggcttactaggagctcaagaaatgagtgacttgaaactcctctgccctcaccctgagcatatttggcaaattccagaaaaacaggcatctgctgctcttctctttcacctaaaagtgaagttctccgatgtaatctcctgcaagatccttgccaggattttgattctctaaatttctttccccaaatcattcttttcaccctcctggctgcccactgctcgcttgttctctcccctcctcctcagccttcctggagtccccctgccaagcctgccctggtgttctagtgcagttggttgactaccgtgaaccacagacttcaaaacagcgagaagaggattttgaatgttctcatcacaatgacaagtgtttgagatgatagatatgctaatcaccctgatttgatcattataccatgtatacatctatcaaaatgctttgaaataaaatatgcagctggttgtggtggcgtgcacctgtagttctagctacttgggtggctgaggcaggaggattgcttgagcctagaagttcaagattgcagtgagctaggattgtgtcacttcagtctgggtggcggagcaagaccctgacactcccctcccctcacatttacactgtacctcagaaatatacacaattattatgtgtcaattgaaaacaaaataaaatttgaaaactaaaataagaacggcccagtccctcattttggtcatctgataagatgctttttccgttgtactcagggcttttaagtttttaatctggaagtgtggctaatagagatgaagggcggagggttggacatggagcttttgagttctttatcatgcgctgtcagtagtacaattatcctcttttatctcttttttttttttccttttttttttttgagacggagtcttgctctgctgccaggctggagtccagtggcgccatctcggctcactgcaacctccgcctcccaggttcaagagattctcctgcctcagcctctcgagtagctgggactacaggcacacgccaccatgcccggctaattcttttgtatttttagtagagacggggtttcaccatgttagccaggatggtctcgatctcctgaccgcgtgatctgcccccctcggcctcccaaagggctgggattacaggcatgagccaccgaacccagcctctttttatgacccttttggtcccatccccactttgaaactcactttctcattcagtagccaaagagccaccaggtgaagaaagaagccgcctgagcgctcttcaggccacacccacaaaggtctatccatcactctgtgattctgttctaggtccccagcaagccttcgtctctggtctgctgtatatttctgatggaatgacaaaaggcctgatcagttaaataggagggcagaaataaattagataccaatgcagtgtactgtgaaaaaatgtactcattggtgaaaccttgaccaactgatattatccctttcttttctaagttttcactgctcttccctactgttggtctgaggaagtattgaatagcctgagtggtggataggtgtgttcattccctagggttgcttctataagcacggtaaaatgggtggtttacaacaaaagacacatattctctcaaaggtctggggaccagatttctgaaatcaagatgttgccatactctctctagggctctagggaagaatcttcctatgattttcttgtaatttctggtgctcctcggcttgcacatgtcatatctccagtctctgcctctgcctctttcatcatgtgatgttctttccccgtgccttcccatcatcttctcataagaacaccagtcacgttggattaaaggcccaacctactccagcgtgacatcacgctttgggaagctgaagcaggtggatcgtttgaggcccaggagttcgagaccagcctgggcaacatggcaaaagctcgtctctacaaaaaatacaaaaatcagccgggcatagttgtgcatgcctgtagtacccgctacttgggaggctgaagtgggaggatcgcttgagcctaggagttcaaggctacagtaaaccgtgatcgcaccactgcactctagcctgagtgacagggaaagaccctgtctcaaaaaacccaaaaaaccaaaaacccaaaaccaaatttcatctgcaacaaccgtattttcaaatcatgtcacaatctgaggagtcggaggttagtgcgtcagcatatctctttttggggtacgcaattcaactcattacagaataggagatgctttgatgtagttgtgcgatcaaagttttggtatcagtgtgaactggggtttttaatatctaaaaataggactgttctgtaaaatctgaaaatgactggaagaaactattgcttcttcctgaaggaaaagaaggtagatgtattggggcaggtttgaaggtgctgatggagaaaacatgaacccactgcaaccacaccgaatccagtccacttacgctagagacaaaccaccaaaccctaggaagtatagagccttgacacaaagggattaaaacaaaacaaaacaaaaaaacctccctttttttaatcccagtactttgggaggctgaggcaggtggatcacgaggtcaggagatcgagaccatcctggctaacacagtgaaaccccgtctctactaaaaatacaaaaaattagctgggtgtgatggcatgtgtctgtaatcccagctacttggaaggctgaggcaggagaattgcttgaacctgggaagcagaggttgcagtgagccgagatcgcaccattgcattgcagcctgggtgagcgagactctgtctcaaaaaacaaaacaaaataaaacaaaacaaaaccctcccgttttagttttctgtagttcactctgttttctcatttacaatggaagagaaatgatctcttcgggtttcaatttctaacaggaggtagcttccagtcagatttattggtcaagactccgttgaaaatgaaagaaacccatctgaaactgaagtttcatgtaattgaaaagttcaggggcagagcaaaatgaatgcagatgtgcttgatcccagggttccaaagatttcctcaggagcctatttttctccatctcttagttctgctctccattctggcttcgtttttagtcactgcgatcacttcctccccaaagggaactgacccattgtcctgacttatatcaccattgattagttttgcctgtttttgaattttatctaaatgaaatcatactatgcaccttttattgtctgcttcttttacctgatttaatcattgcacaatgtatagtattgtaagagttatccatttgtggatgccgtccacatgttatgtttatgagagccatgcattttgttgaacatggttgtagttcattttcagtgctatttgtgtactgtgcaaatataccacagtgaacaatttgttttactgtagatggacacttccccccaagttttactattaccgatgatgttgctgtaaacatttatataaacatatataatattttatatataaatgttttatatatatttatatataaaatgttgctgtaaacatatatatatattttgcatataaatacatatatcttagaagtagaattgctgggtgagaggatttgcatgtattcaactttattttattttattattttattttatatttttctgagacagggtctcactcccatcgctcaggatggagtacagtggtacaatcctggctcactgcagccccggctttctgggctcaggtgatcctcccacttcagcctctcaagtagcagggactacaggcatgtgccaccacaccctgctatttaaaaaatatttttagtagagatggggtttctccatgttgcccaggctggtctggaactcctggcccaagcgatcagcctttctttgcctcccaaagtgctaagattacaggcatgaggcaccgcacccagccagcttgcactcagctttagaagataatgcaagacagttttcctaaggcgattgaatgaatttatatgcccaccagctctttatgagagtttcatttgctccacatcagtcttttttaaatttcattactctcatggtgtgttgtgattccccatagtaatataatttgatttgccctgatttgcaaaaaggtgagggcttttcaatatgtttatttgccacttaataagtgccctgctttctaaggaacctgttcaaatcttttgcccatttttgagaggttttcttattgatatgaaggtttttaaaaatatatattctggatactaatattttttgggatatgtgtacaaaaatatattttcccactctgagtgccttcttattctcttacaatgtctaataatgaatacaagtttttaattttaatataatccaatttaccattatttccctttggagtttgtgtttttgcatccggtttaagatgtctaaaagcttattgttttactgttcgtatttagatgtattatccatatggaatatatttttatgtatgatttgattcatttttttccatattgatatctgattcactcagtactgcttaatgaagacattggtctttctctattgctctaaagtgacatttttgtcataaatcaaatgtctttctgtgtgtatatgtgtgtgcatgtatacatttcattaattgcattgtctattgtctgtcctgtattaatactacactgttttaattattctagttttataacacacactgacatctggtagtgtaaatcggttcttcttcaagattgtcttgacttttaacattagaatcacctcaccagctttcatatacatacaaagcctactgagatactgagtaggactatattgaatctataacttggattgggagagtatacatatgcaatatatataacattgagccttttaatccatgaacatcatgtatctctctattatttagatattctctaatttctttcaataatgttttataattttctgggtatatggctttttacatcttccttttggtttattttcaggtatttgatatatttttggttatgttgtgttactatttttagtatttcattttcttatttttattgctaattgtatttgtctgttcttatgctgctaataaagacataccaaagactgggtaatttataattgactcacagttcttcatggctggggaggcctcacaatcatggcagaaggtgaatgaagagcaaagtcacgtcttacatggtggcaagcaaaaaggcttgtgcaggagaactcccatttataaaatcatcagatctcatgagacttattcactactatgagaacagtatgggggaaacctcacctatgattcaattatctccacctggccccgcccttgacacatggagattgttacaattcaaggtgagatttgggtggggacacatccaaaccatatcactaacgaataaaaatacaatgcatttttgtgtattgaatttctgtctattgaccttgctaagttcgcttattgattctaataaaatatctgtagattcttttgaatttcctatacacataatcttgccatgtgtgaggaatgaatttttttccctttcagtctttaacatttttgtttctttttattttgtttgctgtactggctagaatctttagtacaatgttgaatcgaaactgagagttgatgtcattattctcctgatatgatgggaaaatcttttattattttattattgagttatgattgatgtaaatgcttttctaaataccttttggcaggctgagaaaattaccttccatttctagtttactacattttatcatgattggatattgaggcttatcacatactttttttgcatcttttcagatgatcatataatttttaaaattccattgattgattttgaaatgttaaactaactctatatggcagggataagccactctttcctttgatgtattgtttttgtatcgctgaatttgatttgctgttctttggttcagaacttttgcaactttgctcatgagagatactggcctgtattttccctacttgtaatatacttgccaagtttcagtaataagattttattggtttcataaaatcagttgggaagcatttccttttttccccagtccctagaagttttgttcaaaattattatttcttccgtaaatgttcagtggatctcagtgatgaagctctctgagattggaattttctttgtggggaggttcaaagttataaattcaatttctttatcaggtataggattatttagattttttgtttcttcttatgctggttttgtaaactgtatttttctaggaatgtcatgtcatctgaaattttaaatatatttgcataaagttgttcaaaaacacatgtattttttactgtttcttgattatccataggatctgtggtgatagtctccttttcagatccgatactggaaatttgtaccttctcacttcttgaccagttgtattacttttttgaacaggtaatttaaaaaaaaaaatcagttgttttggggtctttttaaagaaatattttttgactctgttaattctattttgtatttgttttctatttcaccaattttcctcttctaatcataattttcttctttttagtttcttgagtttgtttttaaaaatctttatgatattgagatggatacttaaatcactgttttttagtctttttctagtgcatgtatttaaggctataatttacctccgagtaccactttagtgatagcctaaagttttgatatgccatattgtcataatcactctattaaaagggttttctagtctatttctatttatccttttacctattagttatttaaaagcattttaagcatttgagcatattatattatcttttatattgatttctaatgttattccactgaactcagagaatatactctgcatggcttcagatttttgaaatttattgaaacttactgtaagggttggcatatagtttataggttaactttaactttgtaatgctccatgtgaacttgaaaaaaatgtgtattctgcagttgttgagttcagtgttttttctgtcaattaggttaagtttgctcacattttctatattttaactaactttttgtctgcttatttcatcagttacttaaagaaatgtatttaagtctccaattttgattgtggctttatctatttaaaaaaaattttgctttagtgatgaattagcattttttattattccactttttctcctttactgttagctatatattcttttactcatcttttaatgattaatgttagtgacaaaagcatacttccttgacatataagtgtgtaaattggtatttttcttgctttcctcataaggtttccccaccttttgtgttttttaagtattttacatgccttttaagtccacaaggaattgttattattctattgtacctcaaaaatttatttagatttactgcatatatactctttctcttggtcctcattctgtcttgcatttctggatttcctcttaggtaattttccccacttttttcccccgaagaacttcctttagtattccttttaaaccacttttgttggtaattgcttatttaatatacttcatctcacttttggttttttaatagaatattttcacaggttaggtaattgggctgccaattattttctttcagcattttaaaggatgatgttccattgtctcctgacttctatcttctctgttaaaaagtcatctgtaagtcttattgatcgtttgaagtaaaggttatcttctctctctattgttgcttttcagcagttctactatgatatgctaaggtgtaatttttctttgtttaattttacttggatatgatagtgtttcttaaaactatggcttgctgtctttctccagttttgaaaatttttcttgttattaacttttgaaataaaattttatcttcattttctttcctcctaggattttaattacacatttattacagtctttaccatgacccatatgcctctcgtatgacttcctgtacttttcattgtcttttcttgctgcacctcagcctgggagcacagctatatcctttcttcagctgtgcttagcctgctgttagatccacttattgagttattaacttcatgtattcacttttcagttctagattttatatttcattctttcttacagatttaaattttctactaaatttctctacgttttatatattttagtgaacatattaatgttagttatttaagaagccatagaagataactaatatctgtatcatctgtgagtctgtttctattaccttttttccccatcttgatatttggtcttttggttctgtgtccttgtatgtctgatgttttttgactggttgttggacattacgtataaaaaataatataggcttttagcccttttctttggctaattagcccaaattagcattttaaattattgcattgtttctcctttattgttacttatccttttacccttctgtgaatgaagaaattcgaatttcagcacaatggtgcttataaagtagcaaatgctttgagtcccttctctatctgtgattttggtttagctcctgtctgtcttgttatctctgattcctttaaacacgtattacttatttttttcttttttagaaaacctaattgttctagctgttctcagtgggagatacaatgtagcttgtcttagctagaagcagaaatcttctagaagtcttcctccttgagttgtaaaacccttttctctaaatatcttaggctcctgaaaccataggcttagcctcattgtattgtgctcaaagaagactgtggaggttacatatcataaataaaattacacttatttctccttattatacattgtattggttctcttataggacgttaaagaaataattttttaaaaaactcttgctaaaaaattctcctaactttgagtctttaagggatgaagtctttgagtcttttcactcctctatgctagtagaagatttattcatatttcccagatttatctgtagtttaaaaatattatgttacggatgtggatcttgtggcttctattaatgaaagaaagtggtcgctttcacaatgcttcaataggtggaaaataacaggttgttggaagttttgccatgctgaattatgtagaactgtaggcagacagactctgtttctgaaactggccttggactatgtcatgtcctgtttgagtttgattttgattttgaatttctttgtgggaatatgttggattctacattcttgacacatctctattcataaaacaagattccctctgtataggattgtaatcacttatcagcttttttagaaggtaaagattactactatctagtagcagttcagagcaaatccaggcattccttgtcattctggtgactaaaaggaggctgcagtttttatgcaaaataaggatgagcattgcaattccctgaatcatgattaactttagataattaattcaaaatttattaaagcattgttgcccaaaatgtctgtagatactaccttctgatgtgatcaatatgttcaatggtaaagatgtggagtgtggggttccatgaaagggaagggatcctggattaaaaaacaaagttaaaaaccaaatttatttactggtcacttctcagggaaatctgtgtctttgtaatatacattgtgagtctccaaggtgggaaagggtgaatatagaagtgcagcacttcccaaatgaatgtgaactgtgcccaaccttaacttttttactagttcacagaaaacttacatttttgttataaaccctaggtttcgtgataatgctgggagagtaggagtgaggaaatgttgaactagaactagatgacatgataaatttctactccttatattcattttcactgttgtcatgttaggaaatgtttcttgtttgtatggagtgtttttggtactgactttaagctcttggcaggaaagtttctatagaaactaagcaatcagccagacagaatgctgaaagctcctcctttcctttgagaattaagtgtaggtgttggaaagaagacagaagtagtaatagctcctggggggagggtccccttggttgatactggacacctcttgtctttttatttttacatttcaaatttttatttttccataagtttttggggtacaggtggtatttggttaaataagtaagctttttagtggtgatttgtgagattttggtgcacccataacctgagcagtatacactgcaccatatttgtagtcttttatcccttgtccccccgattcttatccccaagttcccaaagtccattgtatcattcttatgactttctgtcctcatagctcagctcccacatatcagtgagagcatattatgtttgattttccattcctgagttacttaacttagaatactagtctccaatctcatccaggccactgcaaatgctgttaattcattattttttttatggcttcttagtattccatcatatatatttcatcacagtttctttatccactcgttgattgatgggcatttgggttggtttcacgattttgctactgtgaattgtgctgctgtaaacatgtgtgtgcaagtatcttttttgaacaatgactttttttcctctgggtagatacccggtagtgggattgctggatcacatagtagttctacttttagttctttaaggaatctccacactgttttccatagtggctgtactagtttacattcccaccagcagtgtagaagtgttccctgttcactgcatccacgtcaccatctactgttatttgattttttgattatggccattcttgccggagtaaggtggtatgccattgtggttttgatatgcatttccctgatcattagtgatgttgagcattttttcatgtgtttcttggccatttgtatatcttcttttgagtattgtctattcatgtccttagcccactttttggtgggcattgtttgttttttccttactgatttaagtttgttgtagattctggatattagtcctttgtcagatgtacagattgtgaagattttctcccactttgtgggttgtctgtttagtttgctgactgttctttttgctgtgcaaaagctctttagtttaattaggtcccagctatttatgttggtttttattgcgtttgcttttgggttcttggtcataaaatccttgcctaagccaatgtctagaatggtttttccaatgttatcatctagaatttttacagttgccggccttaggtttaagtccttaatccatcttgagttgatttttgtatacagtgagagatgaggatccagtttcattctcctacatgtggctagcctattatcccagcaccatttgttgaaaagggtgtcttttccccactttatgttttagtttgctttgtcaaagatcagttggctgttaagtatttgggtttatttctgggttctttattctgttccattggtctatgtgcctatgtttatatcagtatcacctgtcttggtgactatggccttatagtatagtttgaaatcaggtagtgtgatgcctccagctttgttctttttgcttactcttgctttggctctgtgggctcttttttggttccatatgaattttagaattgttttttctaattctgtgaagaatgatggtggtatttcgatggggatagcattgaatttgtagattgcttttggcagtatggtcatttttacaatattgattctacccatccacgagcatgggatgtgttttcatttgtgtcgcctatgatttctatcagcagtgttttgtagttttccttgtagaggtctttcaactccttggttaggtatattcctaagtattttattttttgaagctattgtaaaaaaggttgagttcttgatttgattctctgctcggttgatgttggtgtatagaagagctactgatttgtgtaccttaatcttatatccagaaactttactgaattcttttatcagttctaggagctttctggaagagtccttaggattttcaaggtaaatgatcatatcatcagcaaacagtgacaatttgacttcctctttaccgatttgtatgccctttatttctttctcttgtctgattgctctggctaggacttctggtactgtgttgaagaggagtggtgagagtgggcatctttgtctagttccagttctcagagggaatgttttcaacttaccccattcagtattatgttggctgtgggtttgtcgtatatggcttttattacattaaggtttgtcccttgtatgccgattttgctgagagttttactcataaagggatgctggattttgtagaatgccttttctgcatctgttgaggtgatcatgtggtttttgtttttaattctgtttatgtggtgtatcacatttattgacttgggtatgttaaaccatccctgcatccctggtatgaaacacccttgatcatggtggattatctttttgatatgttgttggattcggttagctagtattttgttaaggacattagcatcagtgttcatcaaggatatcggtctgtggttttcttttttggttacgtcctttcctggtttcagtattagggtgatgctggcttcataaagtgaattagagagggttccttctttctctagcttgtggaatagtgtcaaaaggattggtacgaattattctttgaatgtccggtagaattctgcaatgaatctgtctggtcctggacttttttttgttggtaatttttaaattaccatttcaatcttgctgcttgctattggtctgttcagggtatctaattcttcctgatttaagcttggagggttgtatttttccagaaatttatccatctcttctaagttttctagtttatgtgcataaaggtgttcatagtatgaatgatcttttgtatttcagtggtgtcagttgtaatatctcctgtttcgtttcttagtgaggttatttggattttctctttcttttcttggttaatcttgctaatggtctatcgattttatttatcttttcaaagaaccagctttttgtttcatttatcttttgtattttttgtttgtttcaattttatttagtttgctctgatcttagttatttcctttcttcttctgggtttggtttgttcttgtttcactaggtttggtttgttcttgtttcactagttccttgaggtgtgaccttagaatgtcagtttatgctctttcaatttttttgatgtaggcatttagggctatgaactttcctcttagcaccgcctttgctgtgtcccagaggttttgataggttgtgtcattactgtcgttcagttccaagaattttttaatttccattttggttttgtttttgacccagtttcattcaggagcaggttatttaatttccatgtatttgcatggttctgaaggttccttttggagttgatttctagttttatttcactgtggtctgagagagtacttgatataatttcaattttcttaaatttactgaggcttgttttatggcctatcatatggtctatcttggagaaagttccatgactgttgaatagaatgtgtattctgcagttgttggatgaaatgttctgtacatatctgttaagtccatttgttccaagatagtttaaatccgtttttttgttgttgttgttgactttctgtcttgatgacctgtctagtgctgtcagtggagtattgacatcccccactgttattgtgttgctatctcattttttaggtctattagtaattgttttataaatttgggagctctagtgttaggtacatatatgtttaggattgtgatattttattgttggacagggccttttactgttatgtaacggtatatatctttgtctcttttaattgctatcacccatctttgtctcttttaactgctgttgctttaaaatttgttttgtctgatataagaatagctacccctgcttgcttttggtgtccatttgcatgaaatgcctttttccaccccttcactttaagtttatgtgtgtccttgtgtgttaggtgagtctcttgaagacagcagatggttggtgagttctcattcatgctgtggttttgtatcttttcagtggagcatttaggccatttgcattcaatgttagtattgaagtgtgagatactgttgcattcattgtactctctgttacctgtgtacttcagtgtttttgtttttgctttttaactcgtatttttgttttgtatgtcctgtgtgatttatgctttaaagaggttctgttttgatatgtttccaggatttgtttcaagatttagagctccttttagcagttcttgtagtggtggcttggtaatggcaaattctctcaacatttgtttgtctgaaaatgattttatctttccttcatatatgatgcttagtttttctggatacaaaattcttggctaatagtgttttatttgaggaggctgaagatgggggtccaatcccttctagcttgcagggtttctgctgagaaatccgctgttaatctgagaggttttcctttttaggttacctggtgcttctgtctcacagctcttaagattctttccttcatcttaactttggataacctgatgacaatgtgcctaggtgaagatccttttaagtgaactttccaggtgttctctgtgctacttgtatttggatgtctaggtctttagcaaggacagggaaattttccttgactattcccccaaatatgttttccaagcttttagaattctcttgttcctcaggaagaccaattattcttagatttggtcgttaaacataatcccttcttggaggctttgttcatattttcttattcttttttctttgtctttgttggattgggttaatttgaagaccttgtcttcaagctcttaatttctttcttctacttgtccaattctattgctaagactttccgtagcatttcacatttctaaaagtgtgcccaaaagttcctgaatttttgattattcattctgtaagctatctattttcttgaatatttctccctccattttttgtatcactttttggatttccttgcattgggcttcacctttctctggtccctccctgtttagttaataagtaacctcctgaattttttttcaggtaaatcaaggatttcttcttggtttggatccattgctggtgaactagtgtgatttttttggggtgttgatgagccttgttttgtcatattaccagggttagttttctggttccttctcatttgggtaggctctgtcagagggaaggtctagggctgaaggctgttgttcagattcttttgccccactaactgttcccttgatgtagtactctccccctttacctatggatgtagcttcctgtgaaccgaacagcagtgattattgtctctcttctgggtctagccacccagcgagtctacccagctctggactggtactgggggttgtctgcatagagtcctgtgatgtgaaccatctatgggtctctcagccgcggataccagggcctgttccagtggaggtggtgggggtggggggtgcaatggactctgtgagggttcttagctttgatggtttaatgctttatttttgtgctggttggcctcctgacaggaggtggtgctttccagaaagcgtcagctgtagtagtgtggagaggaactggcagtgggcagggccctagaactcccaagattatatgccctttgtcttccgctaccagggtgggtagggaaggaccattaggtaggggtggggctaagtgtgtctgagctcagactccccttgggtgggtcttgctgtggctgctgtgggggatgggggtgagattcccaggtcactggagttgtgtatctgggggggttatggctgcctctgctgagtcatgcaagttgtcagggaagtgggggaaagccaacagtcacaggcctcacccagctcccatgcaaacagaagggctggtctcaccagcaccacattccctgcaacagccctgagtctgtttccaggtagagggcatgatgggcttgaaaacttgccctgcgctatctgcctccaagctgcaaaagaaaaggggcttggttcttcccccgactgtggagtctgtacactggatttgctccctcccccgagttctggccagaaggcttctcaccccattcaaattgttaacaaagtccagctagagatttccttctccctatggagttttatgtcctgctcctctggtcaccttcctgatggatctctgtggtgccaggcaggaatggtctgctaggggatgcagcaagctcccagggcctttctattgcttcctcttccctttatttcacttggctctctaaattgactcagctccaggtaaagtcagaaacttctcctgcaaagagaccttcagcttctccagcgggggtatgtgtttgggagaggagggtctccctttcccatttctgcagttggggcactcagtatttaggatgtctccaggtcctgtagaagcagtctgcttccttcagagggttggtggatcctctcgggattgctgctctgttcttgcagtcgatttggagctaaaatgcacaatgtgagtttctgcatgctactctgtccagagctgcaatctagtcctgcctcctctctgccatgatgatcagaaatcgacacctcctatcttgaattcaccatatagcttggtttcccagcggtgagttggtttcccagtggtgacttggttactaggattcacagtggtggatgagagtaggatgaacctgagataccctgagtcctctttgaaagaaaactggggcaagccacatcttagaggatgaattttaaggataagccatcccaaaccatacctttatgcccatccccttattcaaggcaacctggaggagaaaagcggctactgagttatcctgggaatagtgccttgttatttatgtcaccaataaatctcttttgaaacaccatctgattgttttctggttttcatgagaccacaacatttatgagttactgaatacctatcactggtgtgttgtgcatgtgtgtgtatgtatatgtgtgtgtatatatgttgggaggctgggggatgtatgaccccatacttagtccccccagatcctgcacagaataacagctcttcatagctatagggagtcagaggaaatcttgcattctatttggcaacaatagtgtagccaattctttaaggtgcattggaataaaggcaaaacttaagagtgctggggagataaattgtagataacagcagatgacagatcccttgcactaaacccacaccacagtacctgggtcggctgtccctgtcactctaagcagagctgcttcaaatagctttggtggtaatggtggtgggatgaggaggggagcttgttattttccttgactcttccagagaaatttcataaatagtttacttagtgtgttaatctgtgcatctgggaagcataatgcgtccttggcaccacagcccactgtgatgttcgtcgattgcctcttgcagaaggagaaggggttgagtccatctatttagagtattgggaatttttggtgtctattatttagaaagttgtgattggaatctctcttcaagctgaaattatttttgtccccaaataatcaaagccagactccccacaggaggttgtagggtggtggctggtgcacttgagtagaaccaattgctgtcttgcaaatctcatcactgcattagtgaaaaagaaggagatttgtactatgaaaattgttctggagaggcttggccttatggttttgatatatggtaattctgtgaatacaaatatactttctctaggataaacaacataaaactgtagcttctttgatgatgttttgccttgattttagaaagggagatgacaaattagacatcggggttaaattatagtcagtggaacctagttttcaatttgtcttcctactctactgttgagtgtgtcatttttgcaagactttgactctccttctgatatagtcacttattttttccatccaaatcacagatttgagagtacctatgccaaatgctatgaaaataaattttgaaaagtaaaagactttgacatatggattttcttccttcttcttccttctgccacttaccattgtcatagcagtcatcctcattgttatcatcatcatcatctcctaaacagtcttatcaatgctggtattattaactcttacaccttgtcttcgtcattcgctctacacatcattaccagattcatcttcctgagacaagtctttgatcctgacatcatactagccccacaccttcacctggtcagtgtctttgcagccctgtgctccaagtctagacccaaccttcctctcttgcttcagcactccatgctgctgtgagactgacctctccttgtcttccatgcacactcaggactcacttgtctttgcacatgcttttcctccatctctctctcttttttttttttttttttttttgagacggagtctcactctgtcacccaggctggagtgcagtggcatgatcttggctcactgcaacctctgcctcccaggttcaagcaattcttctgcctcagcttcctgagtagctaggactacaggtgcgcaccaccatgcctggctaatttttgtatttttagtagagacaaggtttcaccatattggccaggctggtctcaaactcctgacctcgtgatctgcccacgtaggcctcccaaagtgctgggattacaggcatgagccaccgtgcccggcctcctccatctctttatgtgtaaatgtcactcgaccttcatgatgtagctgaaatgctactttctctaccctcccccatggcatccttcctcttctaatttccttccacacttaatttgttcttttattgtgtcacttaccccattttccttacagtatagttttatatatatatatgtgtgtgtgtgtgtgtgtgtgtgtgtgtgtgtgtgtgtattatcatcttgaaagctgagttcgaatcttcttgaagctcaagttgttcaccttgttagacttgcgtgtctagcacagtgcagcatacagtggtatatatttatcttaactttatccgcacttatttcccagaggggactatgtaagttgtcagtgttttgctgtactaatttgtgaagcaagtcaaatggccctgagttgttcttctaaacatattgtactagaaatcacttttttgcatctagagaaaaggaatggggcaggcctgggtaagatgcatcttaatgggcctcttcggtatggagcaacaagagcaccattctcttcccactgccaaccccctcaccccacctcccctcacccaccagtccccacacacatgctgggctttccaaactgctgtcaatcatttcaatctcatgatagcctctccatgaggaaagtagaactggctgtataatcatcccaagtctgatggatggtgaggaaaaaagtcacagaaaaccttaaatgacttgcggaattgcatagcttgttggcagccaaaagagggaaggacctcaaaacctcttaaattctcattccatggatgcctactagatgagctggtgattcccacccctgccttttttagagacagggtctcactctgtcacccaggctggagtgcagtgggaggatcatggttcactgcagcctcaaccttctgggcacaagtgattctcccacttcaccctccccagtagctagatctacaggcatgtgccatcacacatggctaatttttattttaatttttttgtagagatgggatcttgccatgttgcccaggttggtctcaagctcctgggcttaagtgatcctcccatcttcgcctcccacagtattgggattacaggtgtgaaccactgcacccagcctgattttccctttttcttaggacacagtcatactggattaagacccaccctaatgatgttattttaatttgattacctctttaaacaccctatttccaaacaaggtcatattctgaagtactggaagttaagacctcagtatatcttgctgggagtgacacaatgcaacccacaacaagacccaatttgaattccatcacccatgaccaatttgattcccatatggatctttcctttaatctgattccttttcatgtgtccagagtcaagagcaaaaggctttacatttcatgtggagggattccctaggtcttttggaaacagcttgtgctcccctcacattcacaatctcttcaagctgtcttcttcaccttcttaaagcagaccgattcactttcaaaaggagggtgctgggttgtccccagtaactctagctaggccaggtcagaacgtctgaaaggcactgtgggaaatttccagtgaacgccatccaatcactgaagcagtgaagaggggaatggggatgtggcaggaagcaggaggaacctggcacccaccgtgggggttgggctgggtgggaggcggggctccgtcatcttctctcagcccaggctcctcctcgtttgctcgtgctttttcccacctgcacatcacacatctgcagctgtttccttgggctccttgttgctggaattatgaaataaagttaaaaatggataaatagagaaggaaatgggagggaccagagactcactcaaggctcagatgggctctggttggaagaaacccacatgtgttagcttggttgggttgtggtcagggtggagtgaggggcagggagttgtgcaccacagggtggggctgggggacctgctgttactgtgaattgaatattcatgcaaagaagagggtatgggaggggtgcctggatgaggagagatcagaattctcagctggtgtttcttctccttctttttttccgtcctgaactccagcttttctaaaactctctccatctttctgcttttctgctggcgtagcccaaccacctctccctgaatctcagcaccataaaaagaagccaaatccctttccctgagttcagcgcatataataatatcagtgactataaagatgacatgtatttgtgtggtgcctggaggtttacacagttctttaatttatataatcttattttataatttgataaggcagaccttttacaagtagatctgtatggaagaactagggccaagggaagataagtagcacccccagtcctaataatgacaggagatttcttgtgtggaataaggaagacctagccacagagaggctctgctaaactcagtcctttctggggcactgcactctctgggggtattttggaggctgcttttagagacactagacaagtccttcctcatactttctaacatccaccctttggtggccgatgactaaaaggaaattcacttaaacacttccctagtgtctactatgcactggctcctctagggatattggagacaggactgatggaggaggtaaaaagagaagcaaaatgtggattgtttcttcagggaaaacatttgactgggaatgaacagctgggcgaaggaaggatttattgtcccaacagctgcatgttctggagtgaacctcctgaggactggcagagggggcgtggttgcaggggatgggtagaggaagcagatttcctgatcgtccctatctgtgtgagaaggcgtcatacccatggccagacaaagggacatttacttgaactgacattcatgacacacgggccccataagggcgtgtgtggccaaaaccctcttctacacttcagtctgttcctcttttctttgtaagatgggccaatcctagagcctctgtgttttccaggctcccaggttggccggcattaggccagggtctctcagtgacagcctcaagagtggaggcagaaaagagaggtcagggtatttgtctccttccctctccacttgtggaggcttttcagcagcacctgcctttcctccgtggctctagctaccaccaaacaggctcctgtgggtgaacccaggactcctgagactctgcctcctccccccatccctccagcagggggcagtaggaacctctagcttttgctaatcttggggttgaatcatcatcttccacttggcatcttagctcatccatcacctggaaatccaatttcctgcatgaaagcccctcggttgtaaatattcaagtggttttgtttcctggttagatcctgattgataaaaccttctgataagaaagagccagaactcttgggcatatctttggcagatggcttggcaaagcccctccctccaaagcccagcaccctccacagagtcagggcccacaagctcgggttagccttttcttggatcgaagggttggaaaattgggctctgtgatttgttggacacatgtttatacacagagcctgcgcagtcctacagatttcatgactccaagacgttaactgacttccaagttttatatatttgaatgtttaaaaaataaatttggctcaaagatgaaagggctggaaataatttccatgtcctcatttgtgtgcctcagatattgctactgacattttataaatattttaaacctttcttcaccttctatatgtcaagataaaaaaagacattttagataatagctaggtttgtgggtggtgcttctttcttgattgaggatggatgacccacgaaaatagtaagcaatagtcactttatgcagcagagttttccaaagcacacaggaaagacacaaaggaatatgtgttcagtggtcatagcatttagtggcatgaagatttttttttactccagattctttctgtgctgtatcctcccttttccactgcctccaagcctgtgatttatgccccaacattcagcacaaacttcctctgctccctaccctgactctgattcttcatccagcttcgtctctcttctccctccttctctacaggcccaatgctctctgcttctgttgtctctgatgggagcacatcaggaatttttaaacttttttttttttttgagcaatcttataaacttggaaaaatctcataaaattgaggaccttctgtagggtcacccgccttaaacattatatacaagttccacaggttaatactaccaaaagccatatgtggatcacagtttaagagactctactatatagtcaatatcttttataccagagtttttaaattacctgctaactaaattgcttttcctttgtgacacacaccactcctcttaggagcctctctctctctctctctctcttttttttttttttttgagacggagtcttgctctgtcacccagactggagtgcagtggcacgatctcagctcactgcaacttccacctcccaggttcaagcaattcttctgccttagcctcccgagtagctgggattacaggcgcttgccaccatgcctggctaatttttgtattttcagtagagatggggttttaccatgttggccaggctggtcttgaactgacctcaagcaatcagcccacttcggcctcccaaagtggtgggattacaggcgggagccaccgcgcccggccaggagcctctcttataaaagcccttaattgaattcgattccattcaatttcactcttaatttaattccactgtggtcagttaacgtactttgtagaatttcaatccttttacgtttatcaaggtttgtgttttatggtttaccctggagaatgttgcaagtgcttctgagaatattctgtattctgctgctgataggtagggtgttctatagatgtctattaggtctagttggtttactgtgttaaaatagtctatatctctgttgatttttttgttacttgttctacccattattgaaggtggaatattgaagtctccaactactatcgttgaactatcgttgttgaattgtgtcttcctgcaattctgttagttgttgctttatgtatttttgggttttgttttcaggtgcatttatgcttatagttcttgtatcttcctgacagattaactcttttattattataaaacatccctctttattgctagtaaccgcttttcttttaaagtctattttgtctgatattattggtgtagccactgtggttctcttatagttgctattttctagtgtaacattttaattcctttaattatttttagctatatttttgagtcattttcttaatggttgctctaggccttacaatacacatcttaactcaccagaatctacttccgatttaaactaacttaatttcagtgagatatagaaactttacttttgcatagttgtatttcttctcctttccttttttagtaatattattgtcatatgtatcatgtctgtgttatgaacccaacaatacattgttataattgctaatttatcaaattttatgtttttttaagaagaaagagcaagaatgtgttcatagagtttgttatattaacttatttttccctgtgaatttgagttaattcattacattccatttgatttctttcctacctggaagattattttcataaattttgctcttgacattttaaaaacaattgagaagctaccactgcccctcaaaatcctgtctctttgaaaatccctttcattcaaatgactatctcactgtcattgatagtggctttccaaagtcaaaataactttcctcaatgagttcatcccctggttcagtcatcttttgtgccatctttcttggtaacttctgataacacattggtcattgttctagatctcttcgttaataattcctcaacttcttcatttcccagtcactatttgtgtgcactctgacagtcgcactgtacacctaaccattcctcagaggactttcctgataaaaatgctggctctgagcgtgccttttccaatcaccacagcctctccccacaccttgctgaaggctgctgaacctggactttcttcttatggaaatctttgtgtcccaaatcttgcctggtgttcttagtccaaaacaccctttctgatttttgtgctttcttcccaaggaaagccaatgtacaatgcactttctgttagtacgttgaatccttttatttttaaactctttgttttactaattctaaactttagcctctactgcttacttgctgaagcctctatgatgatcatttgttggttttgatggtccagcactcatttactgtactttcctctctcaggccagtttgctgctgcagtaaattagattccacctgagctctaggggtagactttagacttagacatagccaaatagaacatcacagatccctggccacaatgtttgattgagagattggtactaccaaatcagaaacagtgagatgcaatgagaacttgagtgggattgttggtaaagaggcacaagctctttagagtggatgctgtcaagacccctcacatggaacctgtagaaggcagggtcgaaagaaagagacatattgagtcttatggcagtgtttgaggctcttgatcaagccacacctgaagctagaagaacttgtagacatttttactataagactaataaattcctattttgttctttttgctttggctagcttgagttggatttctgacttctgctaccaaaagaattttaactgatagatatactttctttacagctagacattttaggatacaacaaaagtgagacatctggatgaattaaaaatctttagattcttatagtgatttcaagtcctcagataacctctatctccctcatataccgaaagatatacgggcaaagggaatggttaggcaattcataaaagaagtgaatcaaatagctagtacacagaagaaaagtttaaccttactgttaatcaagaaatgcaaattaaaccaaaagatacatttttttgcaaacaaaattggcaaggcatgaccaataataataattctcagtaaacatatattcttaatattgttgatggtactgaataatttttttttttaaatttagaggctgagtcttgctatgttgatgaagctggtctcaaactattggactcaagcaatcctcctcctttagtcaccagagtagctgggattacagatgcctgctgccatacccagctaatggtactgaatattactgcaacttttttgttggtaatttagaaatataaatttaagtcgcaggcattttacatactgtttaatccagatatttccctgatagaagtaattaagaatgctcacaaagataaaactacatggttgctcttttctgtatatataagcaaaaaatttgcaagaacaaaaatacccaaattgtaaaagattttgcccagtaattaagtaatgactttgtactattgtttcagttggttaagaaatattgcctttcagtggactaaatagttccttaggactggcttttaaactattattttaatttaataaaacaaactttttgagtgcccattataaaacataaacccgactagacttgagagccatggaacataattcctaacctcgagaaactcaatccaacagaaaacaaccactgatgacacacataaaaatgttaaatgccagccgggcacggtggctcatgcctgtaatcccagcactttgggaggccgaggcaggtggatcatgaggtcaggagatggagatcatcctggctaacatggtgaaaccccgatctctactaaaaatacaaaaaaattagccagggatggtggtgggcgcctgtagtcccagctcctcgggaggctgaggcaggagaatggtatgaactgggaggcggagcttgcagggagccgagattgcaccactgcactccagccagggcgacagagtgagactccatctcaaaataaataaataaataaataaataaataaataaataaataaaaaagccgggcctagtggctcatgcctgtaatcccagcactttgggaggctgaggtgggtggatcacgaggtcaggagatccagaccatcctggctaacatgctgaaaccctgtttctactaaaaatagaaaaaattagccaggcgtggtggcggatgcctgtagtcccagctactcaggaggctgagacaggagaagggtgtgaacccaggaggtggagcttgcagtgagctgagattggccactgcactccagcctgggtgacagagccagactctgtctcaaaaaaaaaaaaaaaaaaaaaaaagttaaatgccatcattcctggtaataggtagaaaatcataagggagggcaagattcattctaataggtgggatctaaaaaggctttgtggaggaaatgacatttgaatttagctttgttggatcatcaggacgctgaagaaccgcaaggctgttggtttgtacatacctgcttcgatttcatggtaacaactgaaaaggggagaacatgtgatgggaagcgaagctcctatccctcactgaggccaccctgtgggcctggtggtctgcccactaccctgagagcccccttctctccagggagcactggcccaaaaacttgccagaggtcctaagtgtgtttggctctgtggtgtcattcctgcaagttcagcttgtggtctgagtgtattttccatcagatttttctttgcaaagagtcaggggttagagacatggaacaggaaacagggaagttcttctagaagagagcttgatgaggtcttcatgggtctatatgtgagccatggactttctggcacagtacagagctatatgaaaaattctgtagagatattattgcattgcccctctcacattgtcttacaatttgcactaagaaccgtggctctgagataattagagcatgtgaaatatacgacctattatgggcttgaaatggcctggataagagcatagtgactcagcaaaatctggatgaggtaaacaaaaagagaagtaactcagcaattcccatccagtgaacactcaaagacccaggggtttgtaggcatcagtgcagcacagagcatgtctctggccctgatcctaacagttttagtgcaataagattaaattagaagataaactgtaggacacagtgagatgttggcagtctagcaaatggcttcataaagttgaattgatttaagtgagtaacatatcatagtctagattctggcctcaggatcctaattttgtcagtgtacttaatgatctttcttagggctgaatcacatgaatcaagtttttttgagatcaacaggtaaaactagaaggatatctgtgctcttcaatgcgaaacaatacaccaagatcattcttgttacttgcagtatcttctgcctgacacattttcccatctttcctcctgcccacagtctttgcacagctatctacttctcatcatttaggtctaaggtgctatttttattaaggtaattctgtaggacataagccaaaatgatgtataatagctcaagcctaatagaagatcaatttttgctcatgtaacaaatgaggaacaaggaaagaggtcaatgggggagattctgctccatggagtcattcagagatccatgacaacaatggttcttctactttgagacattgttttcaaggtcatcttagaagttgtcttcattcagccaaaaagaaagagaaaaaagatgagggaatatgtgtgggagatgtctatgagctaaatctgaaagtaaacacatcactaacactttcattccattaggtagaactcacagctaattgccagggaggcttggaaatatatcctagctatgagtcaaggaagaagagtaaaacattgattttggtcagcatttcttgccattgtagttctgtttgagtggatactatttttacatagactgtgttataaatggtgcccctggagttgtataatacggtgggcctgttattgtattcctggtacatagaagagtgagtgttgatagcaggtcatagcaggtgatcactgtaacatagactggaatgccttacactggcatagttagcatatgctctctttgtgtgcagaatttcagggcaagccagattgtagccgatggtttctttgggatgtgggcagttacttgaggatttaatgaaaacaagataagatagtcatattgcatctgttcccgagatagttaaattattgctccaaagtctgggtaagttgaggccttgagtcagggcactctttcaagcaggtaatattaggatggagactgcaaaaattttccgccattatctttactttctactcaactcaacaactgactcagtttttcagagctatggtctaggagaatatgccaaattatgactgaaaattatctgttttgatttactgcatgaatttttacagttgaactcagaatgatctatcaaggaggcctcacccaacccaagtaaggcccacaattagcaattacaagatactttatcatttacaatgcacttgttcttaaagtatgccattggattcttacaacaatgctgggaggaagatcaggcagctgttgtggccacagttttacagatgagctcagagaagtgtgagttaccccagttcacacaggaaatggcaccattgagatccccattcctccgccatgccttcaaccatttcctctctactggctgcttaacctcaacataaagatatgcttacgttttatttatcttacgacaaaagataaactcacctcttaatcctgtgctctctttaatttctaatagccacaggatttcttgccttttcttgatatccaagcttctttcactcgacatcccttttctcctaattcctcctcaatccttggtaatctggctgctgctgccatctcttatagggacctcctcgttcccagccagagaaccattgttgaccactctgtgcttttgcttgactgttgccactgcatctgtctataaatctgtttcctataaacaacaggaattttgacacactatacttcacatcattctcatcaaataagttaaaaatatataggatgggccaggcgtggtggctcatgcctataatcccagcaccttgggaggccgaggctggcagatcacgaggtcagaagatcgagaccatcctggctaacatggtgaaaccccttctctactaaaaatacaaaaacaaaattagctgggcgtggtggtgggcgcctgtagtcccagctacttaggaggctgaggcagaagaatggcgtgaaccagggaggcggagcttgcagtgagccgagatggtgccactgcactccagcctgggagacacagcgagactccattaaaaaaaaaaaaaaaaaaaaaaaaatatatatatatatatatatatatatatatatatatatgtatatatatgtgtgtatatatatgtgtatgtgtatatatacgtatatatacgtgtgtgtatatatacgtatatatacgtgtgtgtgtatatatacgtatatatacgtgtgtgtgtatatatacgtatatatacgtatatatgtatatatatacgtatatatacgtatatatgtatatatatacgtatatatacgtatatatgtacatatatacgtatatatacgtgtgtgtgtatatatacgtatatatacgtatgtgtgtgtatatatacgtatatatacgtatgtgtgtgtatatatacgtatatatacgtatgtgtgtgtatatatacgtatatatacgtatgtgtgtgtatatatacgtatatatacgtatatatgtatatatgatggattactatttttctgacaggagaaaattttggtttggaccaagtgttcaaaataatgaatcctcttacaattttgcctatgtaaagacaggcgggatttttgccacacatttcaaaccttatttttcttcactactcatatttctggtgtcaagatttgtaggacagagatataccatgatatagcctgtggtctcacaccttcatattatgatgctgagtgagtcagacagtaggcagtaggaatattcctaaaagccattcctatgccaggatggcaagcaataatttaactctgtttggaaatgaccttggaccacataaatatataccgctaagtgaaaacaaaatgtatccccaactaaacttcttttagcctggttctaaaaaccccactccagtgccaaccatcgccagggtgtgatagtggagttgcatagagatagtagttgtggctgattgagtttgcatttttataaaacaggcagccaggtacacacgttgctatgtcttttgctaggaccctggaaggcatcttctagatgatggtctctggtcttaggcttcgttagcctcctggggagtctgtccactctggtttggtacaaggccattgagaactaatggaaaagagcaaaattgacctaactgcaccaagtacagtggactaaagttgatttagtatctagccaatccgtttcataagtgttgaaagccaaaaacataaaataggcttttgttgctaaggccctgtgccaggactgggcctgtctgcccttggatccattcctggtccttggcctgctcccctccgcatcacagagtggctgaccccccaggctgacccctcttctaggctccagctctcactggacaggcccctggcttaatcaggttcccctgccccgcgagctcccatatcactaccttctcctgtgtcccctcagctaggatgtgccctggcctcctgctgttgccaatccccaggttaactcacctctgtcacattgccgctgaattttttgctgtaaattccctctgctaatgcacttaaagcggtttttgtcttcctattttgactttgacagggaaggtcctgtttcctaagattttggaactgttgactttgagatataggcaggttgctcagagctgcatggttcgagcaaggcagttattgaaatgctgtaaagaatgctcaatgaactgggatgcacatgctcagatagtcctcacaggaggcaagagaattccacacagtcagaaacccttttgctattaagagtgacatccggccgggcgcaatggcttatgcctggaatctcagcactttgggaggctgaggcgggcaaatcacgaggtcaagatatcgagaccatcctggccaacatggtgaaaccctgtctctactaaaaatacaaaaattagctgggtgtggtggcacgcgcctgcagtcccagctacttgggaggctgaagcaggagaattgcttgaacccgggaagcggaggttgcaatgagatgagatcgtgccactgcactccagcctggtgacagagcgagactccatttcaaaaaaaaaaaaaagtgacagccctaggaaaacaatcagttaagggtgtagaaatattagagaatacatatttaaaatatatgtgatgtaaatcaatgtttacataaatatgtatgagatatatggaaaaaatactaaaaattcccttttaacagttggacaggaagcataattctctgataaacatcacaataaagtgtttggtcagtgacaggaaaataaaagggctggagaagttgcatgggaaggaacatggcagtgggaaaaatgagaaaaagagagaaaagacaaatacacaatatcatgatgaagaataaacaacagttggaggaaactaaaatatactgtgcttaatatataaaaatatttgaaaatctaggtagtccagattagaaaaatagaatcaagatgcatcaacccaagttgatatctgaaataacaggactaaagccattaatgaaattttatatggagtcaaatgtccgaaccaaaatggcattttggaaaagttttcaagtattctatgaataaaaagtttctcactcatgcagtgattccaaagcttactaaagtggatatactttcaataataccaaaatcctaataccaaaaacttgaaaaacaagcatagcaataaccagtactctgtttcatttataaatcatcctttaaaaactcaagtcaaataagtacattgaaaatgtgaaagacaatataagaaaaaaaaggtgagaagagtattaaatattagaaagaaggaattttcattgctttgcaggtagattcaatttacaggaaagcaaagcaaatcaatgaaaaacaattacatttgtgaaaagagttcagtaaagtcgtcagttataaaataactataaaaagtcaatagctttcctacatgtcagcaataagctttaggtcataattgcattcccaatagcaaaagaaacataaaacagatagaattaaatttaaggcaggaatatccaggatacacaaaaaatatgaccacactttatcaaacaaaaataattgattttactacctttagaaatatcgtatttctggaatgtgcagtatagacattatagcttaaattaactggtgtattgaatgtaattctgaaaaaaactgaattaaatttaaggcaggaatatccaggatacacaaaaaatatgaccacactttatcaaacaaaaataattgattttactacctttagaaatatcatatttctggaatgtgcagtatagacattacagcttaaattaactggtgtattgaatgtaattcttaaaaaactctaataatattttttagagcttgacaaagtagccaagaatcttttgaaaaaaaaaattagttatacattttcactatcagaaactaaaataggttgcagatttacaataagtaaaacagaatgaaaatcacatgagattagttgaaaaaggataagaaatcgggatgtgattgtgtcattaaacttcatagattatctaatagtggtgtaattatttctaaaaataattgctcactatttcttatctcaaaataaggtaaatttcagatggaaattaagatttcagtgtaaagaattctaaaaggagattctcaaaggagatatcagagatgtgggctaaaatttatcttcaaaaatcatccccaaaacatttttataatggagaaaaaaattagtaactaaatgtccagcagtagggtatggattaagaaatagtaaagaattcttaggatagactaccatacaaccactgagcatgttatatttatttatatggagaatttttcattttatattgttaagtaaaaatataatttaaacactatgtacaccttaagccatttaagaatatatatatatgaaaaaaatactagtaagacatataccacaatgcttatatatgtttccttctctccttttctcctccctccaagattagtcccccatccctcctccctactccagtgcacagttccagcaaattcatacagacaacaggtagatgggaaatgagtgattcctccagcatttaatttgttgtattagtctgttctcacactgctataaagagctgctggagactgagtaatttataaagaaaagaggtttaattgactcacttccacaggctgtacaggaggcatggctggggaggcctcaggaagcttacaatcatggcagaagggtgaatgggaagcaatcacgtcttcacatggcagcaggagagagggagcacagagagaagtgctctacacttttaaacaaccagatcttgtgataactcattcactatcatgagaacagcaagggggaagtctaccgccatgattcaatcacctcccaccaggcccctgctccaatacgtggggattacagttcaacataagatttgggtggggacacgtggccaaaccgtatcattagtcattttgcatttttaagtggaaataattttaatgtgcaaatgcgggacctaagttacttacagggaggttcactaggttgtaagcattcagaaaagtgtcagcttcagtaaagtcagttaagttatgggagaactcttgatttttttcccattcaggttaaagatccttgataggaaatgactggagggagttatactgtaccaccagctctttatgggcttggatcaggcttctcacacttgaatgtgcacacaaaccacctggggatcttgttcaaaggtagattctgattcaggagggctggagcatggcctgagattctgcatttatgacaagcccccaattgatgttgttccatgttgagtagggagggctgagccgattctgatacatctttttagtttgattctaaatgattttcatttttaccatgataccacacaaaacaataatctctctatattcattttctttcttctggggcctgacctgtttgttttccattcctgggaatgagtgttctacctggggtttgagtcaaatgtggagttaatgtctcatagatgccaagagcaaatagagaataaaaaatgcatggaaaaaagaatatttttttatcctaggcaaatacttcagtcagataaaacagaaaatatctttatgaaactattaataaatccctaagacatctcaaattaaacaatggcaagaaatgttatgtttgtagaaatacataaaattcatttgaggtcaggacattttatggtgtcagccaataaagcagatgggagattccactcatttgaatgggtctgggataaagctgtcagtccctggagccaggagactgggagttctgttctgggccaggtaactgaggggcaattgtggcagtcacccttggtggttggtctgagcagtgggttcttgtgtccgggacatctgaagaagtataaaaagacataaggtagaatgactgaaatgctgttatgtgagaggcccagggaacaatgaattaaagtgactctgagagtgggcctgcacagacccatggccatggagttgtattagttaggatcatgctagatgctataacaaacagaccccatattgttcaatggctcaaagacagtagaagtttactttccctcacataacagttcaaggtggttgtttccaactggtgggcagctttactccatgcagtgattcagggtcccaggctggttctatcttgccatctcaatctagctcacacaaagggaaagagagcagagaggtggaacatctgatttttaatttgggggggtctggatgtggtcagttgagtatcactcactttgtattgatgagaacccagtcacagaatcactttaactacaagaaaggctgctagaaaatagaggctggttgtgctccagatggaagagaaaactggtgtttggtgagcatgtttgccagagttgacacctactgggcatgaacaggtgatcgcctaagcccccaaccaaaaatctcagacttaaaacagaaaggacagtttagaatgttacaaaaggaagcatcctatggttcttcttggtaaaagtgttatgtacagcaaattgagtggtagggggaaaatggtgagaataatattggggcaagtacgttttgagatttattgggagataactcatttcctctgagatgctttgtttataattaggagaagctcttattaggtggtaatgaggcttcaagcatggagagattgtcattcttttttaaaattttatattgtttaaagttttatagatttaggggggtacacatgcagctttgatcaatcggtatgttgcatagtggtgcagtctaggcttttagtgcacccatcacctgaatagtgaatgttgtacccaataggcaatttttcattcctcacccccctcccatactcccaccttttggagtctcctgtgtctattattccactctgtatgtcaagcatttctttatgaaagaaacactatgaaagttaaaagcagagatctcaagacctgccatcatagagctccccagacagtgggctaaggcatgaatggtgtggtgcagaggtagcagagagctgccaggatactgattgtcagcttttagagtggtggcaggggcccaggctgcagctcctgagcttgttgcctttgtctgtgtgaatcccattttatctaactcactgtactattattttgccattaaaagtaatggcaaaaaccgcaattacttttgcaccaacctagtattattacccatgtatgccttgacatgaaaatgtttggaaagcatttctatatataaaaatatgcaaagcattttccaagaatgttacacttttctagttagaattggcttactataacatcatttatcttattctcaagcttcgacctctctttcattcaacatttattgagcatctactgtatagcaggcactgttctacacacggactcctgactttcaaccttcaatgtcatgttggcatcatgagcttttacactgctttgattttcttcttctagctgtctatattgtttttctctttcttagccatgggtgcatttttccattagactgataaaagtaagtcagagcagacactcactggcccttaattatgctcccgagtttttgagatcgcctgtgcattttttctgagctatacaaaccgatcacatgacagttagaaagatggatctctatactgaaaaaaaaaaatgaacctcactgacaatgtttttccaatcaaaagagaggaattttccaaccaaaacaaagggaaaaacctccatctctcggcaggtagatactaagtaaaagcaacacacagctgccaggtttttacattaaacacttaagtttctgtttaatgttttctttatcaagattctaatacttcatcagacacactcggcttcagtcaaggacttcttcagaactgatttctaagagcctgcctcccttccagaaccaaagatgtttaaacaacatttaaacaaaacaaaacaaaacaaaaaacttaacaaggatttttaaacagagatttatagtggtttcatcacaggctcattcctccagagctctgccccgggtggccagcctgcgctgccaaggcctgtgtggcttgctcttgcgcctggcccttctccgacgacggctggccagtctgaggacgcccagcacacgctactcagagcagcccagggtcctctgtggttgtaatgctataatcaccagtgtatagacacagctgctgctatttgcactcttaacagacacttcttggaggaaatggcttcaggcgaagcccaaattgcaatgtctcaagttccaccacccaaggatctaggagtttcctctctaaagatagtgaagattgctagttgtgagacagaaaatattgtattatagtaggtggaagtctcggaggtacaaactaaccctgtagtattattatttgaacttgttcagtgtaacttaaggcattagtgtagatgtagaatgttcaagtcggcctcaggcgaacctacttgcttcctcacactgagcctcgggtggcttcattctttctttctggaccacaaatccacccctctcttccaggtttcgactgtctctctgtggtagtctaaatattgacataatgcttctcccccctcttgactgacccttctttatcaagcccctttctttccaggctcttgctaagaggctgggcacacgctctcagtgtctgctccagttcccaagcgtcttgtggttgacctttgagtggtcagtcatgtttgatgtctcagcgccctacagcatcctcacttgctgcattccccgtggcccgtttcatgatggattgtcatttcctttaattccccttccttgcccctttccttttcctctgccagaacaattgatcaagaattctgtctccccctcaaataataataacattactttttctagggctcacatttacatttgaaaacaaattttaaacaggaaaccagtgccatccaaaatggacatttaggaaaagggtttcctcacagccctcaacaaacactgtattcccttcttttcatttgatggctgcttttcttgccgggggaagaaaggacattataatttggctacttctttgtaagtccaaaacaaggagccagatgtaattcagtagatttgaagcaggtttaacaaaggatctagttcaatgacttgttttgcaataaactgtgtgcaagatttggaaaaatcagcaaattaaagactgctcgagtttcatttctttctgtttagagaatacctattagacgatgttttgagaggatttatgcatggggctggtactgaaatgaattaaaagactaatactgggcttcataacactggagcctggggaaaatatccgagctgctcctcctgccttggaagagtttataagctgagtggaaaagatgggcatgggtggtacaaggaacagttgcaagaaagcaggatggcaagatgcccttaaccgatgtgggctgtgggacagctcactcagattacctgctgcttgtctctcactctgtcctacttcactgtatcttactgtgtgtgtggccaatccgactgaggtaggggtgtgtgtgtgtgtgtgtgtgtgtgtgtgtgtgtgtgtgtgtgtgtgtacatgcatgcatgtgtgttatttttttctctatttgtttcttgcaggttaattccctcctcattcccctgctccctgcctccaagttcttctgtcccgagtaaatatacagttctctagataaggggctatgctactttagtatttcttacagtccaagtaaaatcctaggcacttcttaacctctcagtaaatatgcattgattgattgacttagcatgaccattgtgacggcagtaaatgtataagagaaggaccaatcgacattttaagttccagaatcatccatctgctgggtcacgttctccatatgtgtgggtggttctgtttcagcaaatggtcttttcactagcccacatcaagacaaagacatgttctgaactggagatgatgccaagcctgggctgtgaagaccacccacaaaggcttcagtggaaaagagagaagacactggagaggcatgaaacggtttgaggatgaagagactggacagatggatggaggaccatgaggtgacccaaccaggggcaagaaggaagagaatcggctgctgtaggtcttgggcagcaagaagtttacatcgatcagtttatactgttggattaatactgtttggctggaaaaatagtgtaaataagatgaatataagccatctggttggtatattggtgcaaaatgatgacccataagtaattgagagaaatgctagaaaaaataagaaatgtgttttcgctttttgaagaagaattagtacagccttgttatttaaattttggggagatttactgggtcactaccgtagtgataatcacataaatagcaattaagtggtctgaagcatttggactcatcttgccattacaatcactgttctctgaagtttctcaaagttgggagcagatgataatgcctcagggacagccaactgtgatgtctgagcacaggccaacagttttgtgttgcaattaattaaaatttacaacagagttaatctggcaacatccacatatttaacaaaatggataattgttattgtgctgggaggctttttcgaatgaatggtgaccagatcacgtaaatgcctgtaatttgtgtttctttacacagttaagctgagcctttacagatttttctcctctttgttagggctccaacaacccagaaacaaagccaatgttaacaattttctctgacactgaattaatcctacacacacacacagacacagacacacacacacacacaccttaagaaacaaaggtcttggattgattccttggcaataggatctccatggcctgaatgcccaccccagagtcagggcccaggacccaccctctcttttctctctccatctgcctcatgccttctcagactcattcctcatccatcaagaagtctgaggaacctaaggtctaggcccagcctggctatggagtaaaagttcaggagtcactctgggaaggtcaaggaaaatggaattctgggcttcagagagaggactggcctgggacacggcaggcagatgagcaggtgggtttccagcccctgagggtcttgggaaagagaagagaaaggtgaagcattactctctaaaatgctttgtttttttttagattttttcctacatgataaattcatgatttttggaaaaattaaacaaggtcatgtgaaaagaagaaaataaatatgacatacatttgtagcaccaagtgataaccactttttttgtgtttgcttgtttgtttgagatggagtctcgctctgtcgcccaggctggagtgcagtggcgcaatcttgcctcactgcaacctccacctcctgggttcaagagattctcctgcctcagcctcccaagtagctgggattataggcatgcgccaccaggcccagctaatttttgtatttttcatagaggcgggatttcctcatattggccagctggtctcaaactcctgacttcatgtgatctgcctgccttggccttccaaagtgttgggattacaggtgtgagctactgcgcccagctactaaccacattgaactgtaacttgtctatgcctatatgcacacagagatagttcccccaaataggatcatactgatttgacatatcctctgaatatatcatgaataacccaagttattttatatacattagaggcatgattttaacaatgacataatgataatcattaattatattgtgtgcctgcttggtattggaggacttacggaaatttactttttaagaaagctgaaattgacatcacaaaaataataagagaggggcagctcaagtattacaaagttttctacactgcaaaagaggagaaagagatttttaaaaaatctaagtgaacatgaatattttagggacaaatgattatgcctatccaaagcttctggcactcatgggaattttccatatttttatatttaataggtgtttctgaaaagatacggagcatggggtcagacgtgtctctaagcatctactcttttggaatcacaagcttattcctttgacgtgtgttttgagaccctctagttaaattggatctccagtaccagagtggctagcaagcctgccctaatgggaagtgatggggagatgggcgttggagtctgcagtttgtctttcacggatatttctttcacctggcagacagcctaatgcttagttgtctgacccatgaccagggggtccctcacatgggaagcttgtttttattggcagatgcccttgtggctcttgtctgacccatgtccagtttatgcctgcctgaccattgctctcggctgggagcttgacctcatgttctcttcagcgtcctgggggaaaacctggcctgggacagcccctggttcttcatgtggaaggcagagattcagtacaccaccgcaataggaaacatgttaaaagatttttacttacagatcctgggcagagaggaagcaatgagttgggagggcagtcctccctccctcccttggtcacaggaggcaggaatgaagagtcaggaagagagagagagagagagaaatgcataacaattggtagtaaatatgagggagcaggatgtgggtcacttgatgtttttgaacaaatgccagatggttctttttttattattattttgagatggaattttgctcttgtcacccaggctggagtgcaatggcaggatctcgactcactgcaacctccacctcctgggttcaagtgattctcctgcctcagcctcccaagtagctgggattacagatgtgcaccactgcgcccggctaatttttttgtatttttagtagagacatttcaccattttggccaggctgttctcaaactcctgacctcaagtgatccacccacctcagcctcccaaagtgctgggattataggcatgagccatcacgccaggctgagatggtccttttaaaggaagcagtgggaaagcgggtagcccaggctgataggtggaagaaatgcttctgagttcttatgtctggcactggttcgagccatttgggtgtgatgtagaactggaaactgccgaggtgactgagcctgcttctgctatgagaaagttaaacctgtattcgaaatggatgtcccagcaacagaaaattgtaagaattcactttctgatatccagaatacttctttgaggggaatatatcataacaccaccaagtgtctgaggtttacactcatccattaatatattctttcttccaatttataaaacaaataatcacaaagttagcatttttcttctgtacagtagacagagaggtgctgagaagtctatgccacaaaacatgacttattgcattagtttgttctcacactgctataaagaactacctgagactgagtaatttatgaagaaaagaggtttatttgactcacagttccacaggctgtacaggtggcatggctggggagcctcagaaaacttataatcatggcacaggggtgaacgggaagcaagcacatcttcacatggcagcaggagagagagagagagagagagagagagagagagagagagagagagagatagagagagagagatgggggaaatgccatacacttctaaatcataaggtcttgtgaaaactcactatcagggaaacagcaagggggaaatccacccccatgatccagtcacctcccaccagatccctcccccaacattgtgaattacaattcaacatgagatttgggtggggacacagagccaaaccatctctcttatctatcattcccaaaataaataataaaaatgcagggcaaattgctgagaacagagaaagcaaaaggtggccttgaacagaagaaacatgatatatatcagttagctactgctatgtaacaaatcactccaacagccagtggcttaaaacaacaaacattaattcttattcacatatctgtgtgtttgttgggagttgactaatctaagctatatccagactggcccatctgggctgcaggttacagttaggtctgttttatatatgttcactctgggacctaggtagaaaggacagcagctactcagaggaggaaagttcttttcatagcaatggcagaagtgcaggagctcaaatatcaccacctaaacatatttcaaactttgccatgtcatatttgctagaatctcattggccaatgcaagttgcttggccaagcccaaatacaagaagtggaagagtctaatccatcccagtttccagggacttccctggtttttagcactgaaagccacatcctgagaaatctctcagtcctgggaaaaccaggatagttggtcatcctaggggaagcatactctgcctttagttgaaagaattgcaaagttatatagtcaagaccatggttgcagaaaggcatacgggattgggattaataattcaatctactgcaggatgggcactatgagtctagagctacgaattctgtatctgtgtgttggaaatagcttcagatcctacgtgggtttgtggtctatctacctaacatttgcacaccactttatatatccaaagtgtgctggcactctcatgtgattctataagcctgtgagatgggcgcaaggggcattttagacaatctcagttgacagtggaggacactgtgtgtccagggcttgcatgtcttggccaagttggagcaagactgctgagagccttggttagtaaagggtgaagagaaacctcaagtcgagttcttttgatgctcagcctccattctttaccttctttctaataagtcattctttttgataaaaatttggggtcaatgcctgataggttaagttgaaaagccatgtgttgccctttcaaagccttgaattctagccctgtttgtaactaaggtcactcgctttccgcacagttcagcagcagagaagggaggcacacattactgctcagtatgggatacgaagtgccttccccaaagtagctgacaatgagaatgtctgccctttatatctgaggactcttgagagcagcctgtgagaaaggtggtttatgaagggctctgagagtagaaaggagattagagtttacttactgatggcagaagcaataggaaaagtctatggcaactgaatgaccccaggaacatggtccacgctgcctttgccttttctacccagggcttagtggcctaaagaggttctgtatctgtgaaaggcagtgcccttgtccccttggcaggctctgaggcttactcgaacttgtctggcaccaagggactgagagattgcagagctggtaccctgtgcgcatccagcctctgactcaacatttcaaggaagtcaaatgcagcagtgggtggttatttataaggactgatgtaagttgctccttacaaatcatttattactatttaactgaaagtgatgagctcatgcctgaaaaaaaaaaaaaaggccttcacgaaatgatggacctttggggagtgcttctcctggagccagtttgttctacatggaggagggagggaggaaaggagaggagtaagcctcatattccccttccaacaaatctaccacaatcttataaaatagggggtttcagctgcattttccagtaagcttggtgacttcatttacatggcaaagatttatgaaagaagttcactaccatagatgtctatgacattgagtctcttgacctcgcaagaattctccctctggttgagattgttttctaagtctgaaactctgggttttaaaggcatggtcctatttaaggaggaaccatgtctatgaagtttgagtataatgtgaaatgagtttcatgtggccagagctcaaatactcatgattcctcgcaaatatctgagacccagaaataattttgacatcgtttaaatcaagaaaatgacctgtctgtttctgttttcctgactgaactccccaactaacatgtttatagattaacaaaaaatcaaactctgagatgtttcatatggcacctttcttgaagtttcctgaaacacacacacacacacacacacacacacatgcacacactattattgctcagaaaaaaaaggcaacatagtttttcatttttaaaagtcaggaaataaaaatcatagaagttttttttctttctttcttttcctttttttctttctttctttctttctttcttttttttttttttttttttgttagatatgaagcctctgtctgtcacccaggctggagtgcagtggcgtgatcaccgctcactgctgcctcaacattcctgtactcaaaccatcctcccacttcggtctccccagtagctgggaccacaggcacgtgccaccgtgcccagttgatttttgaaaatgttttctagagatgaggtctcgctatgttgcctgggctggtctcaaactcctgggctcaagcgatccttctgccttggcttcccaaagtgctgggattacagtcgtgaaccaccactcccagccgataagcagtttttcaagcgaagcgttttaactagagaatcgagaactaaaaaaattgtaacaggtagttcgtgctatatttaattcaatactgtgaacgatttagaagactagatcatcaagacaacattgacaactgtggaaaagaatggtgtgcagtggagggcagacttatggaaaagcaggaaaataaaagagatgaaaagattcactgtccctggatcctacctaattcatctcaaggtctactctacgcaaggatctgttaaaaatctgtccccgtaagcatctgggttctttgaaattctcacaggccagcctcgcttctgaccacatagaaactggggacatgttggtcaaagggtgcagactttcaactacaagatagataagtgctctggatctaatgtacgcatggtgactatggttaataattctgtattgcttctttgaaatttgataacagaacagattttaagtgtccctggtgagcacccccacaaatggtaactatgtgtggtgatggatgtgttcgtcaatttgattgtggcaatcaatatacaatgtatacatttatcaaatcatcaccttgaatatttaccattttatctgtcaatcaaatattttaaaataaaactctgtaaaatatacacatatatcacataccatacaatcgactaatttaaaacacgtatagtgtgcaattcaatgttttttagtatatttccagaattatacaaccatcaccacagttttggaacattttcattactcccagaatcaaacttatttgatgtcttttaaaaaatagtcttttttttttaattggctctggagtcttttacaacttgttcctcaaattatttttggaatagctttcctactgataatatattaatagaaaaatctaaatttaaattgaaaaaatgacctgcttctaaaatggaaaaaacttatcacccttttcccccttctccacaccccttgattacatgtttcttaggtaaaatttgttctgtgaaatgctgcatatctgtaacaaacaacctctggagttttttctgttgtcccatttgcatttccatttgcaaaaaatcctttttattgcatggaatggtttattcaaagcttctggcatttttggtattcatctcacattttacaaagcgattacaacagctctaaagtttcttatattaatgagttttaacacaaccattcttttttttttttttttttgaggcagagtctcgctctgttgcccaggctggagtacagtggcatgatcttggttcactgcaacttccacctcctgggttcaagcaattctcgtgcctcagcctccctgagtaggtgggatttacaggtgtgtgccaacatacctggatactttttattttttatttatttattttagtagagacaggtttggccatgttggccaggcaggtctcaaactcctggcctcaagagatccacccaccttggcctccaaagtgctgggattatatataggtgtgagccactgcacctggcctcctgtttttttcttaactgaaccccaattatggttcctctcttgggacttgagtaacctttgtgaaggatcttttttgggatatcctgtcaaaataggatactgagttttattatgaagttatctatataccagaaagccaactctcttgagaagaggtcttattttgtacaatgggtaatcttctaaaattcccaagacatttggacataaaatgttcatatttcatttatttaggcaaaaattggctttaataggggacaatgtgttaattttcttatttggactgtgacatgttttctagaattacactgaaagctgaggtgtggtccagaggctggaggctctttctctaatttaaattgccctgagaattgtttatgaaagcttctagaagtggaaaaaccaacagcaacaaagggacaggcagaataagagccacattttatttttctaagtcagttatatatatttccacagggtttagtactagaaaaatctgaggaaactatgtgtaatacagtcactaagagccaagtgacttttatttacctaaaaaaaggtctccttgagaatgtagtttccaatatagttcctattcttgcagtccaactttttttttagcattctaaaattaaccagacaaacctgatcacttgattcctgggagaatgtttattatcttctcagtgcttacagcataaatgaagttatagtgattgaaatcaagctgcaggtttaaaattcttccaaaaatcaggtaaatcccttgtgaaaccacagtcagcatgcgaaggtggatgtgctgtagcccccaattttcttctttccatccttccctacatcattgttaagtatttaatcaacacctgctcaaatgtaccactcatggaaacttcccctggctccccaggcccgaagaattttcctcatcctgctctatctcttgatcctgcttgattgctcatgctaatatttattcataactgaattggtttttttactcttttctttattttctgcctgctgtactagatagtacctctgtggggcaaggaaaattgctgttttcgatgtctacaattgtgcctggatatcctagcagctcaatgactagttactggcaactactagctacagcatactagtacaggttgaacatccctaacccaaataatccaaaatgctctaaaatccaaatctttgagtgttcacgtagaaccatatgggtggctgaggttgccttccgatggtctgatgtacacaaacttggcttcatacacaaaatataatttaaaatattttataaaattactttcaagctaggtggataaggtgtatatgaaacacagaggaattttatgtttagacttgagttccatccctaagataccttattatgtatatggaagtacttcaaaatccaaaattggagatgcctcttctcccaaacatttgagataagggatacttaacctgtagggtacgtgtgtgtgtgtgtgtgtgtgcgcgcgcgcgtgtgtcagagagagaaagggaatattataatttcagttaaaatcatccaatgtttgatttgaagaacagattttaagggggctggagaagatgtggaaaagcagctgagaacttatgacagtccagatgggaaaggatgcaagcggtggcaacaaagagacatagcagatgatttgagagagttaagatgtaaaatcaacaagacttgacgatggtgtggccgtggagaagcagagagaggaaggtgtcaggtgcatgtctttgaactgatgtagaaaaatgaagtcagggatttggggtggggaaggacactgtagcagtctgcacttatcctctggggataccttccaagaccctcagcaggagcttgaaactatggatagtaacagaccctagccaaggtcacattttacttaaaggaagcactttatttatttattattattattattattattattattattattattattattattattgagacagagtctcactctgttgcccaggccggagtgcagtggcgtaatctcggctcactgcaacctccgcctcccaggttcaagcgattctcctgcctcagcctcccgagtacctgggattaaaggtaccagccaccatgcccagctaatttttgtatttttagtagagatgaggtttcaccatgctggccaggctggtcttgaactcctgacctcaggtgatctgcccgcctcagccttccaaagtgctgggattacaggcatgagccaccatgcccagcccaggaagcactttattatttccctttgggatatccaaattgccagcatcaccactcttgtgctttggagtcattactaagtcaaataagggttacttgagtacaagttccataatattgtggcaatagatctgataacagagagggctactaagtgacaactgcagaaagagaaactttgaataatggaggactaatgtataggcttttcacagagcagaacctatcccttctctccaattccctcttctatataacactggtcctgacctgaactattacaatatagactgttaatacatcatactgcccatttgtgtttgaatccgtactcccttcaaatgaatatccctaaaatagaacttggtacatttcactgttctatagaacactgggcctgatctgaactgttacaatatagactgttaatacatcatactgcccgtttgtgtttgaatccatactcctttcaaatgcatatccctaaaatagaacttggtacatttcacacccctgacaaaaatgtcaatggctccctgtgctggcaggataaataacagtcttaaaactgtttcttaattccgttactctgaattttgtgcttctgacatcccctccttggggaatgccttcctcttggatttgtaaatggaaatgatgctgaatctaacctcttttcccatgcctgaccaatgcaggctttagtgagtttctctcctctgaaactgtagactgtttactgcatagaccattcatttggcactaagcatttagttcaattggatgaacatttactggccacccaccacaaatgtagagacttgcactaagtaacatgaaggtagtaatccttacatacaagggtactttgaaaagtttgtggaaaataaaattaaaagataaaaaaatacaaactttatttctcaatataagcttcatcatgttcaagacactttttaaagtgctgataccagctatttagtccatccctaaggagctgaggatcctggatatttaagcatgtccatgcagccttttttacattattaactgaagaaaaacaggtgccttttaaagattttttttttaattgggaaacaaaaagaagtcagaaggagccaaatcaggactgtaaagtggatgcctaatgatttcccatcgaaatgcctgcaaaattgtccttgattgatgagacaagtgagcaggagcattgtcgtggtggagaaggattctcctggggaagcttacctgggtgtttctctgctaaagatctggctaactttctcaaaacactcttataataagcaagtgttatttttctttggctctctagaaatcagcaagcaaaatgccttgagcatcccacaaaatccttggccacgatccttgctcttgacccgtccgtccgcttctgctttgactggaccacttctacctcttggtagccactgctttgattgcttattgtattcaggatagtattaggaaggccatatttgatttcctgttacatgctttaaagaaatgcttcagcatcttgatcccactaatttggaatttctatataaagctctgctcttgtctacagttgacctaggcacaatggttttgatagctattgagtgaaaagtttggtaaactttttcagtcagaattatataagctgaaccaattgagatgtctatggtgttggctcttatttctgctgttaatcatcagtcctcttcaattagggcatgaactagattaatttttgttctcacaaattgatgtgaatggtttgctgctgctttcttcatcttcataattgtcttgtctcttcttatagcaagctcttctacgtaaactgctgttttctttggggcattgtccccgtaaacttttcataaagaatcaactatttttcattattcttctacaaaagctttaccataaatttgattttgttcttgcctcaattttagcagaattcatgttgttctgataaggacttttcaaattgatgtcatattcatcttagtgcctcacagtggatcttattcagacatgttataacaagttagtatgagtttatcgtggtgcaaaaaaattttgaaatccatgcaaagttttttcataatatgcattttcatgaacttctaaaagacccctcacagcattttataatttacaattaaagtaagtttcctttattaatagtttttatttctatttttattagttatcgtgtgaatttgtgattgccttatgactgttgagaaaaaaagtgcggtgcatttaattattgtatttcttcgtattaaatcatttatgtcctttagctaaatcttgttaagagcattcttttaattttctgatgaattctttttctgagtatttgattgaggattttttaaacttcatacattagaatggcctataatttctcttttctgctacaataattagttttttttaaatttaaataatggatcaggaccctgaaatgtttatatagtcttaaatatttttggtctttagtacattggctctcttcttgacacatttttagccctgaatcttgttagatggtaaattctttgaacatcttttcaacatcttttcagttccttctaatctattcaggtttacagggctttggggagaaacattctagtgatttcacagttttcaaatcatgatgaatttcatcagttagaaatcgtatggattgattggaatgtgatatttacttaccctctgcatttgttactatgttccatgtcttgattttaattttactttctttagttttgcttttttccctgattgcatttgctagaagtttgcctattttattgtttcttcttacccccaaatcaaacttgttgatttatttattacttttcttctagttctattttcaaataaattagctctaattcttacctgcactaataaaagcatttagggctattaattttcctttcaggatagcttctacagctatacatattttggtatgatatattcttttttttttttttatccagctagcttgtgttttcaattttgatttcctatttctttgttccaagagttatttagaagtatgtttcctaatttccaactattaaaggttttttccactcatattctttatttctaactaagtttattggattatattcaggtaatatagcctaaaaacactctgcctctttgaatttgtaagctttatttgtggccaattatgtaattgatttcagtagagggtctatggacatgagggaaaacatatatgtctttatatattccttagttcttttgtgcccaaataactttagtttttattttttatttttttttttggtataccagaaccatctgattcagaaggaaaaatcattggaactgtttcatgatagttgttttttaagccaaaaattatttgaacctctaataatattgtatacttaggtgctatatttttataggacatgcagctttatgattattgtttcttcttcataaattgtcttttattattacacaatgttcctctgtattttgtttagtgcttttaaccttaagttccaccctgtgtgatattaatattgtcactcctgctttctttttgtttgcatttgcttgacatctctctgtttatccttttattttcaaaatttcttttccatttttaagaattctccttataaacagcatatatctgggttttgttttttaactcaatatgacagtcttagttatttaatgggataattcattctatccacatttactttaacatatgatacttaattttattaggcccatctttatgtttaatatttatttactttgtgattctcctttatttagttttattttgtagctgattttgtcattcattctatttttttcttatcttttgaaaatacgactgtatttttttcattctgctagtggcatttcatgtttgactctcctaatcatgtatattttccactattctacagaagtacaaaactcccacctttccccattaagatgctttcttactgacctacttccccaatgctaattagaatatttttattttctccctccaccctgtcctctaactcctatgttttaagacatagtttagaactttaaatttcaggtcaatattagattttctcttattgtttgtctgtttttccccaagaatctttatttagtgctttctaatattatggcaggttatgttattaggaccaattctcctgctaaaacctaaaatttatggagaacatattcattaaaaattatgcttaacagcatcaaagaaatgaccaggttgtaagagattaggaggccacagtctaaaggatctgagagaagtaagcagagccttgaagcaacgttatccttgagggcatttggcaaataggtaaacattctttgtaactgaagggtattcaaactagaaacaacaaacaaactcaaaagactgctcaaagtgcacatctaagagaagatgcttctatcataaaacggggatccctaagagtcaaacccttaagggaaagtgaattagatgtaaattttccattctagttccaggggactgcagggaaatgtttgtttgtttggcattgaacagaacaggtgaaaactatccctaggaagttgtaatcacaatctttcccttgtgtggatttcccaaacacatccagaacacctggttgtcagttacaacttgatttgctaattcatttaaaaatggtccagaattagttagtagtgcccccaacacctggctgaggcaaaagcaaattatcttttcctccgtttcaaagaagtttcacaaaaaattttccaaggaaaatgagtatttacaacaaaactaactgagcacaccaggaaatatggtaccatgaccaagaagcagcagaaacgactgatggtgtagactcaaaagtgtttagatattggaattaccaaaaagagataataaaacaactgttctctactatatatatattttttaaaatacatgattagaagtatcttcttctggaaataagcaactcttaaaaaactgatctggcagtttcaaagacgaaccaagtagaacttctggaaacataaaaggtaaagtaattgaaataaattaaatcaatgaattaaatagcagattagacatgacagaagagtttgcaaactgttataaatcagatcttagaaaaatgtaacacagtggtagtaacaaaatcaaaatcaactgtcacctgaataaaaattgtataaaaagaaaggaaaggagagagagaaagagagaaaaaaagagagagagagacagatggggtgaagggggaggagggaggggggagggggaggggggaggggggaggggttgggggaagaaacggggaaaaaagaaaagagaagaaaattcaaatttttccctagagaaataccaggaaagtaattttggatagcgtaagctactgtgaataaacagaagccccaaatttagtgacttcagcatgacgaaagttttcatttgctcatataaccactcaagttaggtatccctggtcagcagacagctctcttccatgtagcaagtcaggcctcttctctcttatgactttgtatctccatcactgtctgcgtttagctgctgaaaaggaaaagatggtatgcggaggaatacttgttttgtttcttgaaagttttggcccagagtgacacttatccctttgtttattaatgaaaaccagttatggtcagaaaggctgcaatggaggctgggaaatgtagtccctagctggccgtcagttctgagcttgatctgtgtacccatgaaggggagtgcaggtttgcttgacagccatctttgccacctttgtttcaccaggagatataaagacagagtctcagaaagccccccttaggcatagtagaggataatattgaaagcggtatgacaaatgttgtaattgttttttaataaaatgtttaattagagtgcaccagatgttgcagaactttctccttagttcagctaaaaccaggctcttgtcacatggccaggaaagatgaggctcgcagacacatagaagggtgaggaaaatgaaatttattgggcaaaaaggaaaaaaaaaacaaaactctcagtaaagcgagatagagtcctgctagcaggtttcctgcctcacagattgaatcccaggtcaccacacaggaacaggtcaggccaggccaggccaggccaggccaggcccattcccatctcaaatggcatgaactttccgaggctccaccccatcctcccagtgtgcaggtaagcattattcacaaagaatcagtccagaaagggcaggcttcatccaggaccagaagtccagtttttcagtcgtcaggctgttttagacttgaaggcagagtttcgccggggacccttggctgcttcctgtctctatcacacacattcagaaaagtataccagtcctcagtgtacacagcttaacccttttctcgtttttcccgagaatactaccagcggcactggcggctgcagcaattatcctgagataactttgcgacaaaatatcttgcttttattattattattgcattgctctagtgtatcagctttgaatacaaaatcattgtatttatagcttctgtttttagtagtgatatttccatttagaaaatatagtaattctcagtcactgaaaatgtcaaatcctagaaaatgtagcattcctatgtgtgaggttaacatcattctccaacacttgctggccgaagattcatttgataaatccaatttttccgaaatagatgattctcctgattcagacagttctgatgttaattctgtttagaaacaactccaagaagaacagtttttatattttatttttctattgaaaatcagtcagatttgtttcagcctcaaagaatgtgtttatgtaaaattcaaagaaggctggcaggaagctgcacttttttttctaatcagaaaaaacggttaatgaatgatcacaaagtgaaggaaatacccatgtaaataccaaacagaccaataaatagaatattgccagcacctgagaggcccccacctgtgagcccttcccatcactatcctgaactttctactcaaagataaccactgtcttgacctaaaacaccacagactagttttgtctgtctgtgaccttttttttttgttttattttttgagacagagtctcgctctgtcacccaggctggagtgcagtggcaccatcttggctcactgcaagctccgcctcccaagttcacgccattctcctgcctcagcctcccaagtagctgggactacaggcgcccgccaccacgcctggctaattttttgtattttgagtagagacgggatttcaccgtgttagccaggatggtctcgatctcctgactttgtgatccgcccgccttggcctcccaaagtgctgggattacaggcgtgagccaccgtgcctggcctgtttgtgaactttatgtaaatgttatactgtatggtttcgttcctgtctggctccttttgctaaaagttttcttggtaaaattcctttgtaggagaacagagaatggagaagatcaatgttgaagctaaagcacttggtccatcaattcaaatgttaatgtcctctggaaacaccctcagagacagacccagaaataatgtttaatcagatatatggacatcccatggcccagccaaattgatgcataaaattaaccatctcagcaagggtgtattgcttactatctttgaattcagagtgctctgggaagccattagtatactttagggggaataaatggtgttagttaatctagaacactggctgggtggactttggttaagggaattcttactcaccatgaatccatctgccaaatgtttattgagtgcctactgtgaatcacctggtagaggctcacatttgtcacagactggtaagaaggtagcttacttttccaatctgcactttgatttatgcctttgcacattctcttctgcctacttggtgtcttttctatgcatttttcatcacctgggagatttctgctcatccttcaacatatgccttaaaaatcaccttctcagggaagccttccctgccctctaagcttgacttaaaaaggtttgctgttttgccttttgcattcttccataatagcacctatcgctctgtattgtaagaaatcgtttctaagtctctttaagctgtggccacagtccttagtacatagaaagtgctcaatacatgtttgttaaatgcacttgatttttatatattagtcctatatccagcaactctgctgaatccagtttctaatttgggtagtgaagctgttgattttttgagactttctaagtataaagtcataagtagcctttttcttcctttctaatatgtatatcttttttgtccctttccttattaagtaggatggtcaccagcaaaatgttgacagatgtgcctgttcatgttttggattctagatgaatgttttcaatattttaccattaagtgtaatatttgctgtagattttgatacataccctctcttagattaaaaaaatttccttctctgcttactctgccaagtgatttttttagtatcatgaaggaatattgcattttatcaaatgttttctgcatctattatgactacataattttctgaattatgctaatgatgtgatttaaatgaatttatttttaaacattaaaccaaccttgcatttctcaaatacactcaactcggttataatgtattattcctttttatattgctgtttacttattttttcttatattttatctaagatactgtatcaaagttcatgaatgatatcagcctataattttcctttgtgatactgtcctcatctgcatgaaggttatgcttgtattattttaaaagttacaaagtttcaattatctggaagaatgtataagattggtgttacgtcttttttttacatttttaaatattagatgctaaagctatctgggcctggatgtttctgtgctggaagatttttagttacagactgtaagccaaaaacaaaattctaagccccgcagctgactgaatggatcatcctttcagctaagggggcccaactaaacccaaaaaactagttcagaccacgaggagaatgggatatggtcagacatgcctcattatactcgcctgcctttggaattcaggcacatgaccgatcagcactaacattaaaatggagatcctaagacagaacaggctctttgtagcaataagacaccaaattccaacctaactctagtcagtccatctagcataatagtccgtctagcataatagatgctatcacatgacagcagggccctaaaagaaaccaaagtatttttccccaaaatatatttctttgaatattttgaaacggtcctgcaaagttgtctcttgtggggaaaatttacacactatagagaacccccttccctttctaggtctttttctgatcctgaagagattgactgagagtctcgcaccttttaaaggtctgaatataaaacatttgccatctactggcagcctcagagggatggccacctctgagactgtatccacataataagaaccttggtctccacaactccttatctttttttttttttttttttttttgagacggagtctcgctgtcgcccaggctggagtgcagtggcgccatctcagctcactgcaggctccgccccccggggttcacgccattctcctgcctcagcctcccgagtagctgggactacaggcacccgccaccacgcccggctaattttttgtatttttagtagagacggggttgcaccatgttagccaggatggtcttgatatcctgacctcgtgatccgcccgcctcggcctcccaaagtgctgggattacaggcgtgagccaccgcgcccggcccacaactccttatcttaactcaaacattcctttctgttgattcccggtctttagataataacttaattcttttagccagttgccaatcagaaaatctttgaatccacctatgacctatcacccccactcctccactttgagctgtcttgcctttccagcctgaatcaatataagcctcacatgtattgattgatgtcttaaacatttaaaaccaagctgtaactcaaccaccccaggtgcatatgctcagaacctcctgagactgtgtcatgggtcatgatccataacttgacaaaataaacttctaaattgattgacacctgtctccgacactttttggtttacaatactcaatttctttgaaagatacataatttttcagatttttaacatttttctagctatttgataggttttcattttaccaggaatttttcccttctattgaatttttatatataggcataaagtttttataatatcactttttatactgtgcttttggattttttatcttcttctgtctttatcttaactatttccagtcttccattttctctgagttgaggaaatggagttgtcttttttttctagccttttgagatgaatagataattgattttagcctgtattttttctaatctatgtatttaaggttatacatttctgtcttgaggtatgtagagtggagctggaggaaggcgcgcaggggtgcaagggttctgcacggttgactctccccttaaatggttgtatctgtccttggtttattcatatttggttggttggctcttcccagctatgaccaaaccagaaaggaaacaatgattactgggtcaataattttgttcgttgcatcactggctaagagacttgcagagtccttgagatcttatcattgtacaacttccttactactttctacctaaattgctccttactgggatagtggtggtagtgggattgttagaggaaagaggtcctgatccagactccaagagaggattctgggatctcgtgcaagaaagaattcgaggtgaatccatcaggtgaaagcaagttgattaagaaagtaaaggaataaaagaatggctattcagggccaggcatggtggctcacgcctgtaatcccagcactttgggaggccaaggcaggtggatcacgaggtcaggagatcacaaccatcctggctaacacggtaaaaccctgtctctactaaaaatacaaaaaattagcccagtttagccaggcgtggtggcgggcacctgtagtcccagctactcgggaggctgaggcaggagaatggtgaacctgggaggcggagcttgccgtgagccgagatcgtgccaccacactccagcctgggcaacggagagagactctgtctcaaaaaaaaaaaaaaaaaaaaaaaaaaaaaaaagcattccacaggcagaacagaggcacgggccactgtttgcccaatttttatagttatttcttggttatatgctaactaaggggtggattattcatgagtttcctgggaaaggcatggacaattccctgaggtaagggtttctcccctttttagatcatatacggtaaattccgaacactgccatgacatctgtaaactgtcatagtgctggtaggagtgtcttttagcatgccaatgtattataactactgtataatgagcagtgaggacgaccagaggtcattttcatcgttatcttggttttggtgggttttggccagcttctttactgcaacctgttttatcagcaaggtctttatgacctatatcttgtgccgacctcctgtctcatcctgtgacttagaatgcctagcttactagaatgcagcccagcaggtctcaaccttattttacccagcccctattcaaaatggagtcactctggttccaacacctctgacaggatggtggaaaaaagaatccgaattgagggctatcaaaggaagatttggcagaattgcttcatagtattttacttattcagtaaacatttactaagggactaagatatacaacatactgtggggatgggggttgttggcagcatgaataagagaaaataagtgtcctggtagaggtcacagtttcatgggggactgacatgtttacatgactcctactgttaagaagtgataaaccaggtccttaacaacaatattctaaaaaatagcaacatgaggacactttccaagaaggactgtctctttccatacttttatttgttcctgtcacatcatgtttttgactgaaggcaaattatttaatgtgtttattatttaatttgcctcagtttcttcatctgtaaaacactttcctcatttcttaaatcacatagttttggagaaacataaatgagaaaatttcagtacagtcagccctctgtatctatgggttattccacatctgcaaatttaatgaatctcagatggaaaatatttttaaaagaacaataaaaataacaatacaacaataaaaactaatacaaataatacagtgtaacaactatttatatagcatttacatggtattaggtgttgtatctaaagatgatttaaagtatatgagaatgtattaatctgttttcacaaggctgtaaagaaacacctgagactgagtactttataaataaaggaggtgctgggtgtggtggctcacgcctgtaatcccagcactttaggaggctgaggcggatggatcacctgaggtcaggagatggagaccatcctggctaacatggtgaaaccccgtctctactaaaaatacaaaaaattagccaggcatgatggcgggtgtctgtagtcccagctacttgggaggctgaggcaggagaatggtgtgaacctgggaggcggagcttgcagtgagccaggatcacaccactgcactccagcctgggcgacacagcgagactctgtctcaaaataaataaataaataaataaataaataaaataaaaaataaagaaacaaaggaggtttaattgactcacagttctgcatggctggagaggcctcaggaaacttattatcatggcgggaggggaagcaggcaccttcttcacaggtagcaggagagagtagagtgagagtgacaggtgaagccagctggacttcctgagtccagtggggacttggaaaacttttctgtctagctagaggattgtaaacgcaccagtcagcactctgtaaaaacacaccaatcagcactctgtgtctagctaaaggtttgcaaacgcatcaatcagcactctgtaaaatggaccaatcagcaggatgtgggcagggccaaataagggaataaaagctggccacctgagccaacagcagcaacccactggggttcccttctgtggtgtggaagccttgttgttttgctcttcacaataaatcttgctgctgctcactgtttgggtctgcactacctttaagagctgtaacactcactgcgagtctctgtggcttcactcctgaagtcagcaagaccacgaacccactggaaggaagaaactccagacacatctgaacatctgaaggaacaaactccggacacaccatctttaagagctgtaacactcaccacgagggtccgcggcttcattcttgaagtcattgagacaaagaacccaccagaaggaataaattctggacacaagagtgcaggaagaactgccatttataaaaccatcaggtctcgtgagaattcactcactctcaccaggacagcatggagaaaaccaccccccacaatccaatcacttctctctttggatatgtggggattaccagcctctcccttgacatggggaattacaatttgagatgaggtttgggtgggggcacagagccaaatcagatcagggagagatgcaaatactacaccattttataccagggacatgaacatccttggattttggtatccgtggaggctctggaacgaatccctctcggattctgagggatgactgtaatgtgcccatcatgttgcctggcacaacccagatcagatattattgttatctcctacagtttttctttatgcttttcccccctcctattctttaggtgtcccttccgtttttccctaccttctctttttcttctatataactgaccataataaacaacaagataattattttcagtgttttaagaaaatttttcaaaaaggtagtttttctgttcttgattttaaaatcatacgcatgagctgtcattgaaaaaatctaataaaaaataccaaaaatatttttaaaaatttcgtggtgtaaggaaaacttacacacatttccccaccatacaattatttttgtatccctctttagtacgtatgtccttttatagcctaacctttttgagggcagatatggtgtcttaaagttttggtatctttttcagctacaaatattagctacctaataaatactatttttgaacaatggcatgcaagaataaatgtagagttttaggtataatttatcaaggaagaagagaatgcattgtcacagaagaagaacactgtggaaatatagtagatcatctggtaacatttatattcatgtcttgccttccctctcctatatatatggcaggtaacatttgtttggctcttttaactccaattaaagcatttttgtgtgtgtgtgcttgtgtgtgtgtgtgcatatacatttattcttttttcctcagaggcacacacacatatttatgcacttggagacaatgaaaactattattttccagatgccagaaaagagttgctttgacacggaattgtgagctgcagtgttgagttcatgttggaattcgttcccactgcaccctgagtgtgccatcagatagtaagtaactcagcactcccactcagagacagtgactgaagggggaagccttgaagcaacttgtcatcagtcgtgatgttgctttctagctgtcagagaccatgtagacatcaaaccagaaggattcagcacggtattaatgcgcgttttcatggagatctgactttttctctgtgaattgcccaaatattgagaccacaatcaaaacaaaaaccttggagtatcccagtagaactccaaggtgtgtattgtgggggcgggcggggaatcagattttaaaaaatgtaatgtggccagtctgtggtcttcttttattacccaaagatttatcacattcattgtgtaattaaatctctacatctgtggggcacaaatgttttatgtttccaacatttatggtttgacatcggaaacatctgtgcaggcccagtatacaacatctggaagacatttctgagcttttatgacatgcagagtgatctttgttttggaacaagtgtgtggttttctccagtagctcttcctgctggttatgtccttctaattggcattttgctgggggattgaaagaagcctggcttcctgacctcctgctgggtgtcaggagatgcttcagaagaatcttcacatggtcaagattcacagagggagaagatgctgagtcatgaatttagctggcttaaatccctgatcaaggggagcaggttgagagcagagaagggaacatgcattattgggccagaacagtcctagttgctttcttcagttgaaggcattgatggcaaaatgaacttcattgctccatttaccagtgaggaaactgagtctctgagaggttagttcacttaaggtcacctggcttataagtggcatatctgaaatttaaactgaagtttgtctaacattgtattggaacatggtattctcgctctcgaagagtgggcaaggtagtttaacattcaacaaatacttgtttagtatctatgaggtgttaggaaatgttcttagtactgaagatggatcaatggggaaaaacagataaaattccctgtcttcatggtgcttaaatgtgtgcaatcaaatagtgcaataaaatcatgcaactagattatctagtacgacagaatgaaaagaaacaataacacaagtaacattataggtaggaagttggtggttgctacggaaaaaaagatagagctatgtatgggtttcaagaatgttgtggaagagtttattttggtttgggtttccctaagcagagcctgcaacaaggacttggaagtgggtagtttatctgggaggtgatctcaggaagcaaaataagggcgtgcagaaagtgactcgaggtgaggagaaaggacaagaatggacatattaaataattgattaccctggggctcagttcccctgggagtcctccgggggccatgtagaacacaccctagcattgtcctgtggcaaaatggggagcttaggccttttatccttccttgattaaaggttgctagtgaggaacttcaactctcctaaactattcagattgtgtctactaagcacgaaggatattctgtgacttcaaagcagcaaaacacagagatgtctgggcacaggtggagcctggggcactgcaaatgttgccagagcacactgaattcaatggacagttatgccacatttgacctacaggtatttgtaaggctgcaggcatttgtgtcatataccctaagtgtccactatggggttaaaatgtaaagtgatgaggtcattgtaggcttcactgtgtaagtgatgtataaacaaagacttgaaagaggttaggggtggctctctagaggtagtgccagtgcagagggccgtacataaggcaatgtctaaggacatctggcatggtcaaggaacattgagtagacctgagtggctagaatggggtaagcatgaatgggagtaataaaaaatgaggtcagagtagcagaggaccagatcacgtaggctttgtgaattactgtaaggaatggtgagccattggagggttttgagcagaggaatgccatgatttgacttacactgaaacaacccattctggttcctacattgataattgactggaaggaggatgatgagggtgtctgagcccaaggtggtggcagtgggagtgatgagaagtagatggattcaggatatgctttgaaggtggagccaatgggatgtcccaatagagtggatgtgaatgatgaaaggaagagttgagtgaaggaggaatataagtattttggcttcagaaatctgaataatagagctgctattaagtgaaacaggaaaggcaatagagggcacagattcaatgagaaaggtcaagagtttagttttggacatttacagtttgaggtgaatatgggacataaaagaagagatgccaaagtaggaagtaggatctgagtctggagtccagggctgaggcctgggctggagatgtaactgtgggaatcctcagcatacagacatgcttcaaagccatgagacagaatgagatcaccaggggaggaatgccgagggagaggagaagcgctccaaggactgagccctggggcctccaacatttataagtcagggagaagaggaggcccacagagaggatgcagaaaaagtgttcagtgaagagaaggaaagccaagagaaagttgtgtctgcgaagccagattggatcagatttaagagagaattggaggaaagtaaatgcagacagggaggaaaaacaacttctttgagacattttgctgcaaagaagagccgacagcagagtaacagctagatgggaagtgaagacaagagaggtgttttttcctttagttgtgagaagtaatagcaatttgttggccgatgggaataatccatcatttccctccctaagcagagaaaactcgaagatttgagagaggataatttctggatccccagcctaccctaccgtagtcaagaagtgatgggtataaatctccatgggtattttagccttggataagaacaagtacaggtcatcattttaacaaagcaaatatggattatagaatctagtagatgtggaaatgtgttggtgggtttttgtggaagtttgttctgattgtttcaaacttctcagtacagtgggacacaaggtcatagtgttgggtgttaagaacaaagagttgtaaaatatttacctaggagaagtaggaagagaatgaaatagtgaaatattttatcatggccaggaaacaccattaagggacctatttgaggttcatagtcataaatagtttttagcaagacccataaatcaatcattaaagaatgacagagaagagtgaggtcaatgttgctggtagtttaggatcccctgctacatgatcccatggaaatttctgtcttacccctccccagatactgtgagggagcagggaacagggcattctcctacaaaattgatggcaatgagaattgacagagccttcttggtgaacagtttaaaaatgtcaaatttgtaaaatatgtgcacccttgcatcccataatattgttcaaatacccctcctctgcatcactcaggtactcaggaccccacctctcaggaccccaccatcactcaggacccaacctctgcatcactcaggtactcctttctctggctgctgagagtgctgacaccctctgctgagttgctctctgggaattaataagagctgcttctgtagttcggagcagtccacatctaccaattgtgcactgtagactgggtaaaaagacccacctgtttgcctcaggctgggatcattctgaaaggccattatagttccagagctccctgtgagatctgctgaggcgcctttgttgtagctacattgcagctcaacaactatttctgtccagttctttttttctcactcctcaatatccaacaggtgatgatgttgaggccattacaacaatttttcttttttctttgtttttgaaatggagtctcgctctgtcatccaggctggagtgcagtgacatgatcttggttcactgcaacctccacctcctgggttcaagcaattctcctgcctcagcctcccaagtagctgggactacaggcacacgccaccatgtccagctaatttttttttgtatttttagtagagacagggtttcaccatgttggccaggctgatctgaaactcctgacctcaggtgatccacccacctcggcctcccaaagtgctgggattgcaggcttgagccactgggcccggcctccaacaacttttctatactaaaatcattatcttagtctatttccagggaaccaacccatgacccctctgattcagagattctaccattaggaatttatccagaggcaataataaggaggcaaagattttgctgatgtattgtctataatagtgataaatagaaatgacattgattgtaggacacattgcctaaattatttatggtacatccatattatagagacatcgatatgccatatatgcatatttaaagacatgaaaagattttcacaatattttgctgagtggagaatgtcagttatacagcagtaagttcaagtaggacctcgttaaaatgatctacataaatacatgtgtgtaaaacatatgtgtagtaagagacttgaagaacaagcatcaaagtctttaatgtggttaactgggtgctagaattataggtggtttaaataattttttgttcatattggttgtctaattttcataggctgatcataagttgcttttgtaacaagaggaagcgaagtattattttaatttgaagaaaaatgtattaaaactgatctagcttctgagtaagaggaacagatgtagaaaacttccagaacaggaagaggaaggttggccacatgcacaccgaaaatgaacttggattctagacctcactggaaactttccatgacttcatatgaatgtgtctacatttccaaatttcagggtgcacagtcttttaaaggatgcatgtgcggcttgacgcatctctcccagaggtagtctcagaaaaatagtttagttgctgaaatgtctaaagttccaggacacttcagggatgtctggaaataataaacagaatatttgaaatcaagatattaaacaaatctagcctagtcgatcaccataaatgtggatatttccactcttatcacagaggccatttgagagatgccaacattatgctgcaactttggacaaaatttatgtccatgcttcccaaacttcagtcatttttttttgccacttttttgattttttaggtatgcaccatctgtaatattgcttattcaatgcttttccttaaatagactctttgttgaattttaagaacttccctaacttgattcaaagtaatagtattcaagataaactgacttaatttactagtaataatttttagatacacattaaaatgagtacataactgtcaaaatagaaaacatttgtctgtgtgcctctgaagaatcatctcttgtatttgtaccatgctttgggaacacattgcactaggttgtcagaatctgaaagaacagacatttttgggacctacggtaacttgctaaactagagggagagaaggaaggcactctccaacgtttggcttggtctgttcacagcacaggcaaaccctgactcctgctaaaaatttgtttgtaagtcagtcatgtggagcaagaacatattatatgttaaatggatttttatgggctggtgggagaaggtgattgccacatagaaaaatgcaaacttttatggtcttttttttctctgaggctgcttggatgccaccacaaacatgatttatgtatttattttggcccaaggacaatttaccagttcctgatgcctagttaatggacgtagatgtttcttgaatttaattgattaaaactgtttaaaactttgtcttcagcatccgggaaatttcagaaagagaatgattcttatttgaaatcgaaaggaattcagaagccacattgggacaagggacagaaagtgagggtggaaacatctacataagtaaccatgatggtttgctaacactgtagtatggggtgcaggaaggaggctgttgagaagatctttgatctctgttggaggactgttgtctcaccctccaaaaataggttgtggcaattcacataggtaccaagcaatcaaattcttgactttagttgcgaggcccaatatctgggaaacgtcttatgcattcgcatgtcctggttcaaagtccgacaattggctttgatttaaaaatgcccagtgtgggggagactgctcttcattttcatttcctaaaatcatcactagctggacttctttcttatcggaaactaaaaaattcaacaagagacgctatttttttttttttttttgccattttcacagagttttcatttctgatccaatatgccaacccagcacacttttccatatataattctaggaaagtactactaatagtacatgtatattatagttccataatatgtcatatacaaatacttttatacctgctaggtaggagccttctaagattagtcaagtcagttgaaagatagttattaatagcctgtctagtcactggatatttatttatgtgtgagcatggaagcttgacttggggaggaaggatttggatttgctaagataatcacttagtaagcttttaaaattctatgcagatataaggaataatgattattattcatctgctttattggtcacgtcctcttccctctctcagtcatttcttagtaagttctctatttatttatttatttatttatttatttatttatatgtatttatttattttttgagatgcagtcttgctccgtcgccaagctggagtgcagtggcacaatctcggctcactgtaacctccgcctcctaggttcaagtgattctcctgcctcagcctcctgagtagctgggactacaggcacccaccaccacacccagctaatttttgtatctttattagagacggggtttcaccatgtggccatgatggtcttggtctcttgacctcgtgatccacccacctcagtctcccaaagtgccgggattacaggtgtgagccactgcacccagcctctctatttattatacaccacttctctctctaagattttgaattccagttgtgatagactgctactttgtggctcctggcattcatgccctagtgtgcaccctctcattgaatctgagctgccctgtgatctgctttatccacgagctcagggaagtagtggccctgatgtcgttctccacttaagtcttcagaatccctggaaccttttgctttcgtgtcagggggagccatttaccatgcaagaagttctgctaccctgagaccttcatgctgtgagaagcccaaatcagctgagccgagagttcatgtggaggagaaatgaggcttcaggcaacaaattcagctgtttcccagcaagttgccagcaccaactcttcagccatgtatgtgaaaccatgttggaagtggatcctcttgcccctactcagacctcctcagctgatgccacatggaatgcaggtgaactgtgtgtacattttcaagggattctgtagcaaagaaacacaaattaggtgactaaaacaacagaaactttttcttttacagttctggaggcgagaagtctgaaatcaaggtattagcaaggccgtattcccgttaaggctttaggggtgtatccctccttgctacttgcagcatttggtagccccagctattccttgtgtcaataaagccaatctctgcctctgtcttcacatggccatcttccctctatggctgtgtcccaagttccttcttataaggacaccagccgttggattagggcccactctaatgacctcatctgaacgttattacatctccaaagaccctatttccaaataaggtcacattcatggcactgaagattaggacttcagtatatctttttggaggacacaattccatccataacaaactgtccacattgagccctgctttttaattgaagaattgtgatcaaataaatagaatgacgtttttggcccctgaattttgaattactttctcacgtagcagtaaataatgaacacagcaagttatttccctttgatgcctccactgtaaaggcgctgccatttcctgccctgaattgcaggaaatctttctttctgtcagttttttttctccccaggctatttttttgtgtagtaaatgttggtgtatacagttttatttctttctcatttttattcacttccaattttctccatctcaagcaaagtttcactgggagttacgttatctctctagtatgattattccaatatgactacaaagtcttctcttctgttttctcaagtaccaatgttttccctgttgcctcacatttttagatctctgttgaatgtctggccctacgatagctacagacatttgattgatctcttcttcccttcatcagcatgcacttcctccctcactagaaggatttgacactgggtattcccttctctgacagacccaactccttttctttttattggcttgggctgagaacaaggcaagtgtgatctgagccacctcttaagtataaggaatgtggcttttaaaaatgcatgcacccaggattattctcaattcagattaccttaattggtggtaagaattgaagctggagttgggtagttaatgaagatgccaggtgggaaggagtgaaatactggagcctgaatgaacctatggaataattcttgttaatccatattttattccaacgtaacttctttgtcactcttatacatccaaatcctggcttgtatcatttctagttctgaaaattacctccttgtgactttttgtatttacccacatcatcatctccttaaagactccagccttgaactcacttctctttctccccactcttcaatcaccttgaacctctggcatttcatccatctgccccatgcattattactatatcacatcagtcccaacacatacacatacccacatactcacagagagagaatctggtgcctccaaaggctgactggttgatccaaaatactactgcttgaagatattaagaaatgagggtaagaaagaagtgcacaatgatcccctaagtctcaggaccaaaggacattcaaaaagcaaggagcatggagcaaaaatgcaaaggcaggtaccttcaatacacatcgttctacagctttacaggatccaactttccagaaggtattatgtttcatgagttcagaatgcagttctctcttataaataaacagttcagtaggccttgcagtacctgatcaatgcaccaaaaagaacaaataagggtagaaagaggagcttaatttccaaggaagttatatctattcatgtgtagcttatgagaaaactaccttttcctcaattgtatctgcattatcacatgtgcccacttttgaagtggaagaattctataacggggtgacactgagattgagttttaaggaaaaagaattattcatatatttattcattcatatcaactgctttgtatttggtgctagatgtcttgggtttggtttcccaggagaaaatctgagtcaaggattttgggcaagtttttttattaagatggtttttttcaggataacctgaaaaggtagttggattctggcactccccgataaagtcagtggagattatagaattccccaagccaggaagttttctttgtgttctaaagaggcaaggagagaaatggacagagtcaagaatcttggtccaagctctagctctggctctaaccagtggtgggttaagttagttacctcaaaagctttccaaaaagattttgaaaccattaaacaaggtaacatacaattttaacaaatggtcagtgacagccttctatagggtaagaagataaagttgcagaactgaaggctcctgtccttgggagattcccagttgtgataaccagactggattcttgagtcagtgcagctgccacatccatccagtaggggcgccaactaacacaggattgagatggaaacatgactgctaattcattaaggtttccacgtatgactttttacataatggaaacgtgcttcctcttgggctgaggaagatagcactcaagcacagaaatctctctgatccagcccctgccccagcaagatgagtgttattgaaagaaccgaaaactggtttaaaggaaggacctctaattgcctggctatggcaacaaatagttggtttgtccaaagctttcacatgtttggacctagccttatgtgagaaaacttccactagtggggagcagctacagctccaatgcataacagtgaggggctctaggaaatatgaatgttgaattgttagggaaaaaattctgcacctaatccgtcacttctttgttcactcaacaaatatttactgagtttctgccagccgccaggcattgttctaactaagccatgcggacacagcaataactagaacaaatataatccctaccctcttggaacttacattctagagggaaagagatgttaagtataacaaataaggaaacataacagtgtttcaggtgatgatagtgtgatggagaaaaagttgaggtatggagtaaggttgcttttttgtacagggtggtcaaggaaggtgtcaaagataagatagtgtttgagatgagctctgaaggaggtgaaccgtgcacctcttttagtgtgtgtgtgtgtgtgtgtgtgtgtgtgtgtgtgtgtgtgtgtgtggagtgctcagagaatcagctagagtggctgtggggaatccagcaaggaggagagtgacaggttgtagtggtggggcgggtggttggaaagggcgggttatgtgggacaatcgttctcaaactttgctgcacgttaaaaccacttgtgaggcttttaaaaatcccaatatccaggccttaccccagatcagattccctggggttgggaccctgagatcagtggcttttaaagccccccaggtcattcccatgttcaactagggctgaggaccagcaatgaggggctttaggtcattgctaggatatttgctggttaattgtaggtaccaactaggcagaggtcatggtgccaagataggtggttgaatattactctggacctttctctgagggtgttcttggatgaggttaacatttgaattggtggactttgagtaaagcaggctgccttctgtactgcaaatgagcctcatccaatcagctgaaggcctcaatagaaccaaaggctgagctcccacaagttaaagggaattctgcggcagacatcgtttagacttgaaccatagcattagctctcccctaggtgtccagtttgatggaccaccctgcacatttggacttgccagcctccataattgtatgaaccaattccttaaaataaacctcttggctgggcgcggtggctcgagcctgtaatcccagcactttgggaggccgaggtgggtagatcacgaggtcaggagttcaagaccagcccgaccaatatggtgaaaccccatctctactaaaaatacaaaaattagccagtgcggtggcagatgcctgtaatcccagctactcgggaggcagaggcaggagaatcgcttgaacctaggcagcagaggctgcagtgagccgagttcgcaccactgcactccagtctgggtgacagagtgagactctgtctcaaaaataataaaataaaataaacctctttctctacatatatgtaatctgttggttctgtttctctggagaaccctcactgatacaggaaggttatagaggtgggatagaatctgctttaaatacatctctggttgctgagataaactttttgtagaggggtactatgatttggatatggatttcttgtgtccaccaaagctcatgttgaaatttggtcttcagtgagtggtgctgggaggtgggggcctagtgggaggtgttgggtttgggggcggatctctcaagaacggcttgggttgttctgtgatagtgagttctggctccaggattagttcccacaagagtgggttgtaataaagcccagagacgtgtcaggtttggcccctctttgcctgtgttcgatttccctttggacttctttaccatgttttgatgcagttcaaagtccttcacctgaagccgagcagatgccagcaccacgcgtcttgtacagcttgcggaactgtgaactaaataaaccacttttctttataaatgacccagcttccggtattcttttatggaaacgcaaaacaaagtaagaaaggaggtcgagggtcaaaatggggaaaccacttgggaagacattgcaataaccagtcaagagttaatggtggcctagacgcagctaataacaggaggtgatgagaaattgtaggattccgtattctctattaaggttgtggcatcagcatttgctgttggatatatgacaggtttgctacaatctattttggagatctagggcttcatcaaatcaactgttagtttagtcacttgttttatttgattcagatcacatgaaaccagggagaaaagggccgtaagtgttaaaagacacatgcagtaaagcgaaagtctgatccttagagaattctggcctcaaccaaacaattcaaacgttttcaaacatgctggaataagcaagaaacaaaacatactttgacagataatttatttctaaactatatggatctgaagtgtaactgaatccagctgtttctcctcctttgctctttctctctcccatctctttgatgaggcactgacagcctcagaacacgtcaagtgtaaagtttgcacagtgggacaaaacgttttgttattcacaatgactctgacctcaggaaggctgagttttcatctataaatcatcacccagacatccaagtgctgcaacagttggcaagaccctctatccaactgcaacaaggccaaagtcgggcatgccccaggaaaagcctttatctcaaggtagaagagaaagcgctccatgactgctcttcgtctcttctctttttcagctctgcctgcactaattctcaggtccagaaacctgccttctgtctttcaccgaggagtccttgcagaagtgtcccctttatctggtggctgtttcttccatctgctttatccgcttgaacacttgatcttttctgaagggcctttgcaaaaggtgaggcagattgtgtctccccagcctcaacttaaaggctacttttgtactgaagccttccttaagtcttcccaaacgacctgaccttcccttgttattggcctttgtagtcagtgcaagtgctgtgatctgaatgcttgtgttccttccaaactttatatcctgaaatccttatccccagggagatggtttcaggaggtggggctgttgggaggtgattaggtcataggaatgaagcccttatgaatgagattagtgcccttataaaagattcgtgcccttccaccatgtgaggttgcagtgaaaagatgactgtctatgatgaatgggccctcactgcgcaccgaatctgccagcatcttgaccttggacttcccagcttccagaattgtgagaaatctgttgtttgtaaacttcctgatctactgaattttgtatagaagcctaaataaactaaggcaactttgaagatccacgttttcagcacctagtatatatgtagccatccttctaatgtctgttatatcctctatgcactgaagcactgttaagaatagcctgaagcctgcctgattcactcctgcatgcccagcctccagcagtgtgcctcagactcgagcattcagttaataactgaaaaactgctgtgtgcctggcactatgctaggctctgagtacacaccgatgctcgacaaagattgggtaccatgtgatgaaattcagatgtaaacatgttctaaattctttattattttactaaaatgaggtcttatgtccaaatttctagtatcgagaaaaggtatcatcattatatctctaaatctccaaggtagaaatgttactttctccatttttttgtatgaagtaccaagtcttatagtttacttctttcaaatagtgcttatagtcacattttctttcatttttcttacactaatttttggtccttttcatgcctgaattactaaaatagctatttcattctttcttctttcctggaggtaatctggtatatagcatcataaatctggtgcgtattcaaatacgtatgcgtgttcaaattctatacttttgctattatgtgtataatatatgtatatatgtatgtatatatacacatacatatataaatatgtttatatatgtttatatagtatgtatcacacacatgcacacaaatgtacttaatatgtgtatgtatatacaattgtccttttgtttctgtggaggattggttccaggacctctcatggataccaaaatccacagattctgaagtccttgaaataaatagtgtactatttctatataacctttctaaatcctcctgtgtacttcaaatcatctctagattacttgtaacatcgaatacaatgtagatgctatgtaaataattgttatactacttgtttagagaataatgacaagaaaaaaacacctgtgcatgttcaggtgcaattttggggagggggatattttacatctgaaagttggttgagtccacagatgtggaacccacagatacagagggccgactgtataaaataggtttatgtgcttttaaacatttacgtgagtgatgtaatattgtgtggaacattctgtggcatgcatttcatttgttttgttaattttatcttttataaaatatatatgactttttataataatttttaaaataaaggttattataatgaggggattgggaattcctgtttcaagatggtaatctaaagccatttttatttttattttcctcttagcaagtcttcaaaaaataagaaaggaagcaaaatcacaaattcacctggataaagctgagtgctatctacaacatatataactgcactaaaataaatgatgcaactataaaccaagacattgtgatgttaaagtagaattcaaggcaagaaatatatggggcaaatatttcttgtttttagtgaagcttataaagaaaatataaatcataaatatttgcaccttccaaacaccattgaaatagataaatcaaaaacttgcaaattgcaggaataattgctagaacacaggaacttttgtgacattaagtatttctcttagtcattattaaacaggataaacaaaaggagaaaggatttagaatttaaatgatacaattagtaaggtggatttaggcccggcacagtgggttacacctgtaatcccagcactttgggaggctgaggcgggtggcccaaggtcaggatatcgagaccatcctggctaacacggtgaaaccccgtctctactaaaaatacaaaaaaaaaaaaaaaaaaaaaaaattagctgggcgtggtggcgggcacctgtagtcccagctactagggaggctgaggcaggagaatggcgtgaacccaggaggtggaggttgcagtgagccgagatcgctccactgcactccagcctgggtgacagagcaacactccatctcaaaaaaaacaaaaaaaaaatcaaaataaggtggatttaataggcatgccatctattaaacagaaattgtatggcacatgaattctgattattaaggaatgctactagaaataagtaaccaaaacataataataaagtaatccgtcatctgaaaattttaatgcagtgtcttaagtatgtcttggaagaaaagaaaacatcagcccttcaattaaattatatttagaaatcaatgagaatatgaacactataaattaaagcttatgagaaatagctaagaaagcactgttcaaagttaactcataatcttaggtattttaatgactaaagtgaaatcaaaataaactgtactaattcaagaaattagaaaaaaaggaaagaaaacaaaaaataaatcacgaaataaggaaaatgaaataggaaaataaaataatatattgaataatataaaaatgaaaattagtgaattaggatttacaaataatacagtaataaaatagtaaaatatttagcttgtctaatgaaaaaatagagatcactcaaaaacatacatttaggcattagaaagtaatataatcacagatatgaagtagatgaaatactaaaaaatgataaggcgcacgcaaagctattaaatttgaaaactttagacaaatataaattagaaaagtttactgaagtagaaaacttgaaataaatatttagtcaagggaaaaatggaaaaaagtcaagctattaccaacaatagaggatccaattctagacactcttatagaagcattctttcaaactttcaaggaacagataatttctatgatgtaaaaactgttccatattctatcattttttaaagtttatgttggaaaaacactcaaactctctgaactcagtttcttagttaatataattatggtaataataataaatatgcttgactataaaaatgtaaggaatcagagatacacttaaaatattagaattgataagaaactacagtaatacggtcaattataaaataaatattaaaaaactcaactccattataataaaacaattataatttgaaaaggtaacagagaaaacatcctattcacacaagtaaccaaaaaaccgtaataaaaataatacaatatataccaatttactgaaggatataaaagaatacttgaatacatagagacatagatttagaattaggggaagcttgtcataatttcagttgtggaaaatatgaagtacattggcagtatgattgtttacataatttttataatttttctgtaaaattaacttttgcatgttcagtcatttctgttaaagtcttgaccaaaatattttctatgattttcaacaaataggagcatctactctcctatgattctctagcttatatttagttttctactgaacactagcgaacaaatacatttcctgtgtttaatttgtattattggtggggttgcttctatattccagagaaattacttatcttgcccagatggtgactcacataaatacatgaggattcagggactaatgattagatcaccaaggaggtatgagggacctcccaagaggccagagcaaacaagcatctcaaccaccagactggcactcagggaaggggagggaggacatttgatcagacctaacacatctctgagaaagcctaggatgaatctccattcccagggatctgttggaaatactcttctaccttggaatttggtttggaaaaaggggctccagagcgagttactactgagaggatcttggaatttttccatgtaacaacttcccacaggccagaacataccattcgagtcaatggacaaagtgtgggcaggttcttcagagcaggctaaaaagaatttcacgcacaaattctccatttgtctgtctttttacatccttctcttgattcatctccctcctatgtttcaaaggtagattttttccttgtctaagttcatgggatacctagcatacgaacaatcttttctttcaacaattctttcttcattgcaaaaagacatttattgagcaccttctatgttcagggaatgggcttgggagctaaagttatacaaacatttaagatatagtttctgctgttgagtggtttacaatcttaactaggtaatcttgattttaaaacagtataaccccaaactccccccacactcccaccagctgcaaacacacactatagcagaactactgctggggaatgtggcttcttgctcctgaatttaagatgctctcgttggatgcccagagaaggttctggacaaagaaactggaataataggctgtaaaggcctaaaatgtaggcagataatcgtatcagaggggttggggatcctgtactgcaccacctggtcatgagaaatgagagagaggtcacaggctgaggtctttaaatctcagcaaacctccttgccaacaaccgatgaccgcagatgttggagctctgactagtttccacccctttctcctacagtcttttacagttggcacccaactgtcttaaactcaggagcaggaagccacataccccggcagggttctggttaggctggtgcaaaagtaattgcggtttttgctattggttttaaacacaatcacttttgcatcaacctaaaatttgcagcagatgaagtatgaggtgggaaaggggtttgggtgtatttgctcagctacttataaggcagcactgtatttcccatttctcctaggatgtaggtgcccttgcctgccttcccaccttggcatctccaattgcccactccccatctcgctttcattaacccccaatttcctcatccccaagacacctttaagcactgtggtcctcaacattcacttagtccttggcttatactgctttaccctggcaatgtttgaaactcatagttaccaatacagaggctgaaaattggattttggctctgccactccacagtttcctcacctgtaacctggggaggtagctagaaaacctcacccagggtaagagcagggtcatcataggggaagacgaatttgcgattggtcttgaagttagggtagaagttctatagttagaagtggcccaaaggaaactattctagaaagggagaataatgtgagcacatccttggagaagagaaatcatgtggtttgttcagaaagcataaagaaagccagtgttggagggtgtagaccatgagtgagaggactgtgggaaggcaagttttgagtgttcagctgaggacactcattgaggcattatgcaatacatatattcagccatatccctatcctccagtgcactttcaacttgcttcattttttttttttttttgagatggagtcttgctctgttgcccaggctggagtgcagtgcacaatctcggctcactgcaagctccacctcccaggttcacgccatcctcctgcctcagcctccctagtagctgggactacaggcgcccgccaccacgccccagctaattttttttgtatatttagtggagacggggtttcaccatgttagccaggatggtcttgatctcttgaccttgtgatctgcccgcctcggcctcccaaagtgctgggattacaggcgtgagcctctgcacccagcctcaacttgcttcttaaagagtggtccataggccaagatggtgaaaccccatctctactaaaaatacaaaaaattagctgggtgcggtaacaggcgtctgtaatcccagctactcgggaggctgagtcaggagaatcgcttgaactcagagggcagaggttgcagtgagccaagatcgtgccactgcactccagcctaggcgacagagtgagactctgtctaaaaaaaaaaaaaaaagtggtccacgggccagcagcatcagcatcatgcaggagtttgtgaaagtgcagaatctcaggccccattccagaccttttgaaacagaatctatatttgaggccaggggtggtgactcacgcctgtaatcccagcattttgaaggccgaggtgtgcaggtcacttcaggtcaggagtttgagaccagcctggccaacatggcaaaaccgcgtctctactaaaaagacaaaaattagccaggcgtagtggtgggcatctgtggtcccagctactcaggaggctgaggcaggggaatcacttgaacctgggaagcggaggttgcagtgagtggagatcgtactacttcactccggcctgggcaacagagcgtgaccccatctcaagaaaagaaaaaggccggacgtgttggctcatgcctataatcccagcactttgggaggccgaggcgggtggatcacgagtcaggagatcgagaccatcctggctaacacagtgaaaccctgtctctactaaaaatacaaaaaaaaaaaaatagccgggcgtggtggcctgtagtcccagctaatcgggaggctgtggcaggagaatggtgtgaacccgggaggcagagcttgcagtgagccgagatcatgccactgcactccagcctgggcgacagagcgagactctgtctcaacaacaacaacaacaaaaaagaatctccatttgaacaagattcccatctctatttgaacaagattcccagacgacttgcatatacattaagacttgatgaacactgccagttcaatcacacagtttattaaaagcgcaaatgtccttggaagtctaaggcaggaacagaaggctttgaaatgtacttgacaactggcctttaagtcattacttcgaaccttcatttctccagcagctctcagcatcatccttggagatagtatatcccaagctctcaaacttcaacaagcacaagaacaaccagacataagtgttcacaggcagattcttgggacttacactccatttctcttagggattctgatatcaattatccagaagctataatatgagaagcactaggctagaaggactgcttatcatcatcaagtaaaggattctggaaaaaatggggaattggaaaatattaatttttttgcaccaaaaagctttggatttgctgtattggtctgtaacttgccccagccctgctgtagctggacatttatcacagttaaagtagaaataacaccattagcctttcaagcagtgataaaattagcagtgtaaacaaagcaagtaaatgaccttagtcagattccttgttgactctgacccaacacctaccaagatgattagtcagggcaaatgagaacagggtgaagaggcccctgtgaggagaaagatcctctccctgtttacttcctgaggatcctccagcacacaggacggttcctaaaatgcctgcaaatgattagggctctgaatgtttagcgctttggccccaattctgtgccaaactctgtcatggttatttttttccaggagggaaagttccttccaacttagagtcttactgctgtgaatattccggcttcctgagaaaggggtgttctctcctagagttccagcaacgcagaattcagggtgggaaatgggccacaatagtcacttccatttttcagaagatgggccctgcattgggtggatggaaactgtgctggttggtccgagacagacatgagtataaaccttgtctcttcccgctggccttctcaattagccaaattcaaagtgagctcctcttcttccaaactgcttgtctgtgttactgacttgggctccttctgctatgttctgtttttgattgcattgtttcctctcctaattgttaagttattgaggacaggggccctgcattatacttctttttgtcttcctggtataaaaagtccaggatctgattcagagggcctgtcttgctgtcctggttttaacattgctgaggagggaaacagcccttttattctccacctaacacttcccaagagaacaaaatcttaatatatttcagatgacagatactaggggctaggttgacaggtaagccatgtgttaaaaggtccaagtttacaggtgagtgtgtgtacgtgtgtgtgtgtgtatgtgcatgtgtctatgtgtgtgtgtgtgctcatgtgcatgcatgcacgtttgtgtgcatacacacgtgcatgtgtacacatgtgcatgtgtgtttatgtgtgtgtttacatatgtgtgcgtgtgtgtgtgcattaccctgttccttccttcctcctatgcagctggagcagtaagcttagcacctgaaggtgtgggaggggtacccttctctttgcattcttatcccctacatgcccacatggatgtggccaggagctcattggaaattaggccaagctagtactggttattcatggcaaatataacaaatatatgctcttccctggctgtctgggctctctctggctctattctcctctttcactccatgtaaactagcctcagtatcatgctccagcagggtagagcagagaactcagcatcaggaattaagcttacagcccatctgccagtgctttgcgcatacatccttctcttgggaaacctatgaggaagagtatcttaggtttggtctcctggtctgttgccatcaatgagcctgtgaatcccaagttttccctcactctctgctctgttccagcactgtgccttcttgtgcatgacataaatgctctgaatcacagtttttgcctctatcaaatggacataatggcattcatgatcatgctcacagagatttaaacgcaataacttggtatattctagaagcgtattcaaaaggaacttttttattgtctcgttcctcaggcttagtatgatttctcgatggagtggagataatgaatccttatgggatggctgattgaacagataagatgtgattctcacctataccagctgaattaatgcatctattgagaggtgattttctatttttaaagaaagtatcatgcagcagaactacctggtgagggcatacatatcaaatgcaatttggctttaggagattcattagcgtctgttctctaagaagtgaatctgttggagtagctgtttgtttttttggaaacaaacaaaaaaatctgttttttgtttgtttctttattttagggcttaattttttgagacaatcttgctctgtgcccaggctagagtacagtggtgcgatcttggctcactgcaacctccccatcccaggttcaagccattcttctgcctcagcctcccgagtagctgggactacaggcgcgagccactactcccagctaatttttgtatttttattagagatggggtttcaccatgttggccaggctggtctcaagctcttgacctcaggtgatccactggcctcggcctcccaaagtgctgagattacaggtgtgagccaccacacctgacctggagtagctgtttttgaagagggctctcttaattaaaccagtatggtttggccaactcgttatggttgctctaagcaaattttgatcgacttttacgctgtatgtgtttacagagagcctgacctgcagaaacatattatccatatggaaataagggagaaacacaatgatgtatccgtctcacatcagaagaaaatctaggtcttttctcttgtctattttgtcttctgtacccaagcttgcagaaaaccagacacttccaatgaggacagtcccctgataaaaagccctcaaggaagcctgctgtgctctgtgtagtgtcattgcactgtgcatggggcagctgattccaatcttgactcacacacttgaatgcaaagtgaggttggataagcacaaggccttacgtgtacttgtacattgttagaaatcaaaactggtcgaagtctctgagaatttcagtccaacctcttataactctatctttcttagtttcttcttttctgcctgcaagcatagtcatatctcttgtctactaaaacaaaaacaaatctaacaaagcaaaataacttttctcttatcctactatcatactgtagtgctgctgtttgtcttttgttttcatacatctgcagaggatgctacattatcagacagtttgtttcttaaataaattttactggccgggcgcggtggctcacgcctaaaatcccgcactttgggaggccaaggcgggtggatcacgaggtcaggagttcaagaccggcctggccaagatggtgaaacccccatctctaccaaaaatacaaaaaaattagccgggtgtgttggcgggtgcctgtaatcctagctacttgggagggtgaggcagaggattgctcgaacacgggaggtggaggttgcagtgagccaagatcgcgccactgcactccagcctgggtgacaaagactcaaaaaaaaaaaaaaaaaatttactgtgtggccgggcgcggtggcttacgcctgtaatcccagcactttggaaggccgagaccagcagatcacctgaggttgggagttcaaaaccagcctgaccaacatggagaaaccccgtctctattaaaaatacaaaattagctgggtgtggtggcacatgcctgtaatcccagctactcaggaggctgaggcaggagaattgcttgaacctgggaggcggaggtagtggtgagccaagatcgcgccattgcactccagcctgggcaacaagagtgaaactcttgtctcaaaaaaaaaaaaagaaaaagaaaaattactgtgtatatttgaggtttacaacatgatgttatgggatatatagagattgtaaaatggttactagagtgaagcaaattaacatatctaacatctcacttaattacttttatttttgtagtaagagcaagtagaatctatttattttacaaaaagccctaacaacaatacggtgttattaaccgtagtcctcttgatgtacattacatatctaggctagttcatgctacgtatctactacttttgtcctttgaccctcatctccccattttctccctctcctccccgcccctgtttttttttttttttttttttggagttggagtctctctgtgttgcccaggctagagtgcagtgctgtgatcttggctcactgcaatctctgccttccggattcaagcaattcacctgcctcagcctcccgagtagctgggactacaggcacacgctgccaggcccaggtaatttttttttgtgttttagtagaaacagggtttcaccgtgttgctcaggctggtcttgaactcctgagctcaggtgatccgccctcctaggcctcccaaagcgctaagattacaagcatgagccgcagcgcccggctgacctcttttttttctttgaaagattccatgtacaagtgagatcatgcaatatctttctttctgtgtctggcttatttcacttagcataatgttctctaggtccatccatgttgtggcaaatggcagggtctcttctttaaaggctgaaaaatgttccattgcatatatatctatatataccacattttcttgatccattcacctgtcaatggaatcttagattgttttcatatcttggctattgtaataatgctgtaaggaacatgggacgcagatatctttacaaggcggtggtttcatcttagacactattcacccacttcttaatcctctctgccctgaccaccctgcccgaattacttcctaaaagggctcacgtcagctacttgcctggcaaatacaatacctattttttattccttggtcctctttgcagcatttgatattattacatgttgttgtccattgtattcaccatgtctattttctggtttttggtgctttgatatctgtggcttgctgagcctggatgatgcttccttccaggacttgccaatccctagagatagaatataattttccctgcagcatgcctttcaattccaaccacctcctctccagaaacctcagactcagggccaatattcccctctcctaaccatccccgggccaggtcccagacatctggggatggcccctacgccccagagttcactgaagttattcaaaccaccaaatcctaaacctgctcaccttacctcgcccatttcccgatggaaaccacaaggaaggaaggctcctgcccacatgcccccctgtccctctgcctcctgaccagccctggtacttctccttgtggtcttacgtcgagtgtagtgctcttgtttctagggatctgtgagtataaaattgtcttcctttccatgtctgcatgtcttaccatacctaactgaaacagatcccaggtacttaaaatatatctactcttatttttggaaagtatcagcttccttgcctttggaaccactctctctttgacttatttcattttttgcatttttctgtttttgtttctgatttacttattgcagctctagaatcagagtcatccctacaaactaagggatttctcactgtgagatgaagaggatggtaagttaaaaaaaaaaaaaaaaaaaggcaggaccgggcatggcggctcacgcctgtaatcccagtactttgggaggttgaggtgagcggatcacaaggtcaggagttagagaccagcctggccagcatggtgaaaccccgtctctactaaaagtacaagaaattagctgggcatggtgatgcgcacctgcccggctacttgggaggctgaggcaggagaatagcttgaacccagcaggtggaggttgcagtgagccaagatcgtgccactgcactccagcttgggcgacacagcaagacgccatctcaaaaaaaaaaaaaaaaaaaaaaaaaaggttttgtgtttgttttccttaaagggaatagggagaaagagtttagggaagacaaagtttagaacaaactctcataacacatgcattgaacatgcactcctgtaagaagaaatcggaaagcatctttattttaactctcaccgtccctttaaagttgtgcttgcctttggatgaaaatggcaagacccagggttgtgcactgtgattctcatgctaatctgaattcagttattagaatggccaattccatgtagtcaccaaaactccaaacctgacttagcattgtctttcccgcctccccccaccctcttttctaagaatggcttcagtcgactcgaccacctgctgcctgggaggaaggttgtagtcaactttttctttctttctggttgatctctaccagcatcctgctaactttagcattcgttccttccagggctggaacacaggaagagaggaagagagaagtactgtgatttctcgcttgactgatattgtcacaagatggctttgctctcgtcctgagaaggacaaaagctggctcttgctccaaagagggcatctgtggctctgcagagatgctgctgctgtggggccttgctaacttcaaaccctggacgtctcttttggctgtccctctgggggacaccctcagcccctggatttctggttgtcctctctgcacaacatttactctgtggaactctttcaggcagtcttctagtgcaggatttaaaatagctctaggacagcattctttgttgttgttgttgttacatgaataagttctttagtgttgattttttttttttttttgagatgaagtctcgcattgttgcctgggctggagtgtaatggcacgatctcggctcactgcaaactccgcctcccaggttcaagcgattctcctgcctcagcctcctgagtagctaggattacaagtgcccgccaccatgcccagctaattttttgaatttttttttttttttttggaaatggagtctcgctctgtcacccaggctggagtgcagtggcgcaatctcagctcactgcaacctccgcttcctgggttcaagcaattctcctgcctcagcctcctgagtagctgggactacagcttcatgccaccacacccagctaatttttttgtattttagtagagacggagtttcactgtgttgcccaggctggtcttgaactcctgaactcagacaatccgccttcctcaacctcccaaagtgctgggattacaggcatgagccaccgcgcccggtctttagtggtgatttctgagattttggtgtacccatcacctgagcagggtacactttacccaaagtgtaatcttttatccctcacccgcctcccactcttgccctcaagtacccaaagtccactgtatcattcttatgcctttgcatccccatagcttagctcctacttgtgagtgagaacatacgatgtttggttttccattccagagtacttcacttagaataattgtctccaattccctccaagttgctgcaagtgccatgatttttttctaggacagcattcttatttaagacctataggtgatccctttcctttggggagaagcccagtcacttctagatgttgacctcgccactgctgccactcgccgctttgcctttccctgtgtgattctgggccgtggtgctgcctacctacaggaagtacatcttaaacccggtcaggaggtttgaggctggtcaggaggcagagggacaggggggcatatgggcaggagcctgcctttcttgtggtttccgtcgggaaatgggctaggtagggtgagcaggtttaggatttcgtggtttgaataatttcagtggactctggggcgtaggggccatccccagatgtctgggacctggccctgggatggttaggagaggggaatgttggccctgagtttgaggtttctggagaggaggtggttggaattgaaaagcatgctgcgaaaagttaaccatttcgccctctctcactaggcttgtgtttagaaggaagcgccacccacaggtgccctcttggtgggcaatgaacttcaacagaaagacatttctttctcaggaaatatttttccatttctttggagaagagctttggaaatgctccccctggaacattcctgggtatcttttctatctcctccaagttccacaatcaaaacttccactctagcatcacataacacattttttaagagttaaggaaaagtaagaagaattcttcaatgattttagtatacctaggtttttaatgatcttcatttaaacgatgtcactacaaatatttaaagttatatatgcaagacaggcattaagtatgatgtttctccttacaaatgtaaagaaaaatcaggctagactctctaacacttggttttctatgcctgtgtaaaatctctctgtttggacaaagccatgatctatatcagcggtcctcaaacctggcagtacatcaaatataacctgagggacttatttaaaattcagatgtcaggctctattccagacctactaaatcagcctccaggccattggtgttcttatcaaactgcacttttgatgctcttgcacaagtaagttcaacgatctcctggtggtggctggtcagaaatactaatgccaccttgaaagacgtacacagcccctgatgggcaagtctcgtgaactcaaacttaaaaatttcagtctccccagtagttctattgggagtaaattccagcaaagtcttatttgtatttatttgtcaagagggcttctctatctctgctcctgaatagtgaaaccccacctccaggtctactagtcagcgctctgttgagtccattgttatggaatgtccctgtttaacagggttgctaggaaagcctgactcacaaccttcaaccccatggtttctatgttccgatgctaagtcctttattaaccagtttatccacttgttctttactaggcttgactccttgggtctctgctgccaactctcttgttttgtgtcttggtagtcttggggattttaaacatttcactcttttctcttactccttaatcagagaatggaagttctccatggctgtcatcagtaacctctgggtatgaaaaattacatcaaaagttcctggccattcaaatgttttcctggtctgctattttgattttgtcttctaccagtggtaaaaagctttctgtcctaattcacagtttcagctttgatgctgagagttatttgggaaatgctaagagaggtaggtggtgatggctaaggtagaagacatgtggcggggaggttctaggatgttagtcagaatttatagctctccccttcatcactctaaaatctagacaactgaaatcattctgactcttctctctgcttccaatctccctcaggcttcacctccttttactttcttagtcacacagctactagagttactcttataattgagatcaccccagcctaattcttccctacctcaccccattcttcatggtttcctgtgatccacagattgaagtccagaatggcttggtgctttgggggcatttccagttttgacttccatttctctcagctataatcctaaatttttcaactttctcatgatcctccaaatatgttgtcttagcctattctagctgctataacaaaagtatcatagactgggtaacttaaacagcaaacatttctttcccacggttctgaaggctgaggagtccaggattgaggctgcaggtgatttggtgtctggtgaggacctgcttccttgttcacagatgacccactgtcttctcactgtgtcctcacatggtggaaggggacaatgagctccctaagtcctcctttttttttttttggagatagagtctcactctgctgcccaggctggagtgcaatggcatgatctcggctcactgaaacctccacctcccagatccaagcaattctcttgcctcagcttcccaagtagctgggattacaggtacccaccaacacacctggctaatttttctgtatttttaatagagacggggttttgccatgttggctaagctggtctcaaactcctgacctcaggtgatccacccacctcaacctcccaaagggctgggattacaggcatgagccaccgcattcagccctcagtcctcttttacaaggacgttagctccattcatgagggtttgacccacatgatggaaccacttcccaaagccccacctccaaataccattgcactgggagttaggaactaaatgaatttagagaagacacaaacatttagtgcataacatatttcatgccctttcttgtaaacatgattttccccttgatgtttttctggctgaaattgggaaagaaaatagaactcatttgttgagtcgctaccacactccaggcactgcaacacatatctttacatatacatcattcgtttctcacagtaaccctctaaaatagttacttgcagccctattttataaatagggaaacagatgatttaaaatatctcatccagaattgcataattataaggctcaagctggaatgaacctgcatctgtcaatgccaagggccacctattcaccctatgccttcctaatatcaattcttcccaagctgggcttccatgtcactttttccatgaattctctttcaatttcttcccagttcattgctctcattccctaattcgtaagtaagtatgtgttgagaatgtactttatgccagacactgtgctggttcctaggggtagaggcatgaatgagacagagtggatttctgccctccaggagcttacattctcctgggggaaataaagaataaacaagcaaacaaaggactaaaaagataaagaatgtgtaagtactgtaaaagtgataaataaggcaatagcagacaagagtatctgggagggatctatttaacatataaaggattagaaaaggtctctaagacctggtatttgaactgtgacttggaaaatatgacagagccaactaaataaggtgctggagaatgagcacaccatgcagcgagagaagcaagtgcaaaggacctggggcaggaaatagctttgcacatttgatcagcagtttttctgggccatttgtgagtggtagaagattagcttgaaaattagtaggcacttggtcatgtagagccatgaggacactttgagttttattctaaaagcaatgttaaacttttgaaggatttaaaaaatggctttatggaggtataattgacatgcaataaacaacatatttgaaatacacaatttgatatgttttgacatattgtgttaggctattcttgcattgctgtaagtaaataccttaggctgggtagtgtataaagaaaacatgtttatttggcccacagttctgcatgccttacatgaagaatggtgctggcatctgcttctggtggggcctcaggaagcttgcaatcatggcggaaggggacagggaaccagtatgtcacacagtgagagcgggagcaagagagagagggaggaggtcccagactctttaaacaaccagatctcacatgtagtaactgagtaagaactcactcatcacccaggagatggtgctaggccattcatgagggttccacctccatgatccgatcacctcccacgaggcctcacctccaacattatgaatcacatttcaacctgcgatttggagaggacagacatgcaaatcatctcacaccatgagatgacaccaaattatacccccgtgaaattatcatcatgatcaagataatgagcatatccatcattcccaaaagttttgtcatggtcctcaaaaccccactcaaaaccctacctgaccccagctccaggcaaccactgatttgcttcatgtccctgtaaattagtttctattttccagaatcttatgtaaatgaaatcataaagtatgtacttgtgtaagtgtgtgtggcttgtaggttttcatagattccttttatcaggctaagctctcttctattcttagtttgctgagtgttttcatcaggaatgggtgctgtattttatcaagtgcttgttctctatctttgcagatgatcatcttgctttttttttttctttttaagactattagttgattgtttggaatgttaaactaaacttacatgcctggaataatccctacttgatcatgatttattatgctttttatatattgttgaattgaatttgctaagattttgtttagaaaatttgcatgtatgtggtttttttattcttgtaatatctttgcctggatttgatgtcaaagtaatgctggcctcataaaatgggttgggaagcattccttctcttccctattctttaaaagtttattctaactggtattatttcttattaatgtttgggagacttcactagggaagctgcctgaggctggagggttttttgttagaaggttttaaactacaaattcaactttaaaaaatagatacaggattatctattcaggttctctttctcttcttaagcaaacattagttatatgtttttcagggaatttgcctatttttctaagttctcaaatttattgccataaggtggttcacaataagcatttatcatccttttactttctgtataatttttagtgaggtctcatttttactgatctctcatttctaatatctttcgtttgcatccccttcaccccaaaagttgataagtctggctggaggtttattaaatttattgaacttctcacataaccaccctttgatctcatttattttctccactatgttttctgtttcatatctaattggattttgccctatttttattatttcatttttttatttggagtttaacatgttcttttctagtttatttaagaagaaagctaaggtctttgatttgaggcccatctttaggtcttccactccagctggtggaaacaggaatgattcccagtctcatgtgaattctaaagaattgttccctctaggggcggggcctggtggctcacgcctgtaatcccagcactttgggaggccgaggtgggcggatcatgaggtcccgagattgagaccatcctggctaacacggtgaaaccccatctctactaaaaaacaaaaaattagcagggcgtgatggcaggagcctgtagtcccagctactctggaggctgaggcaggagaatggcatgaacctgggaggcagagcttgcagtgagccgagattgcaccactgcactccagcctgagcaacagagcgagactccgcctcaaaaaaaaaaagaattgttccctctaatcttttcaagtagttctttccctggcctctgtttcctcacagatatgcattgggcagcactcagcacaagacttgaggggaccctgtgtaggtctcaggagctgtcttgcagctctctcttctccagcgttctcccctgaatcccacaactctgacttccttggcctcccagactactagtattgtctcctcagctccacaaggccaccaagccctgcctggtttccctagaaattctcttcagaccaggcgcggtggctggagcctgtaatcccagcactttgggaggctgaggcgggcggatcacctgaggtcgggagttcgagaccagcctgaccaacatggagaaaccccgtctctactaaaaatacaaaattagctgggtgtggtggcacatgcctgtaatcccagctacttgggaggctgaggcaggagaatcgcttgaatccgggaggtggaggttgcggtgagtctagatcgcaccattgcactccagcctgggaaacaagagcgaaactccgtctccaaaaaaacaaaaacaaaacaaattctcttggggcagtagctggggcaatcgaaggactcttcctttgttttgaatctcggttgaatgttttgtataccattgttttatactctttgtgtagtgttttagttatttcatactagagcataaggctagtccctgttattccgacgctatcaaaaatggaagtttcatccttttgggggatttcaagtggaggagtggtgttatatcatccaagggttaagaagatcactcttctgctgttccatctgaaagcagatgggaagtggaggacaggtctgctattgtaggaatgcaggcaggaagtgctaggaattgaagagggattttttttttcaagggccacgggggcagagggtggctccagatccacttggaggtggaacccagagaactggctgataaactggatgtggagtgggtcggggggaaagggagttaaagctacctcctgggtgtttcctagaacaactgggccaatggggaaagccagggaaggaagtgggcattgtggacaggcggagatcaggagttacagtttggatataagcttgagatgtctttttaatcagtcacatggatctagtcaaacaggaagagggctataagaaggtagagctccagggaggagtcagagttggagacagaaaaacggagtcatcagtatagaattattcaaagctctgggcctggaggagatcacccaggggaacagtgtagacagaggagaaaagaaggcctagactgagtccgtgggaccttcagcatctagatgtcaggagagcaggaagagctgagaaggagttggagaagaggcacctgtcttcccaggagactcaattcctttatttaaccatgtgtttttcagttttataattacctgtttatccacctgtcgctcaacttgcctgggagcccttgaggtcggatgccctgtcttattttgcattgcccacatctaacacggtgtctggcacctagatggaccttgaatgaatgaatggatgaatgaatgaatgaatgaatgaagactaagggagttaaaagattactggtatgaggtcaaaaggacagagcttttttgtagtccaagggactgcaaaagacaattctgggaaagttgagctcagaaaaaaaaaaatctaacagtccagaaacattttcctgagtgccagtttcctgatctgtcaactaaaacgtcccggagaagtgatctttagagttacttctgtttacatgctgcacacagacgggaacgctccatttggctttctctgcagagtccacaaggagacaaaacaatgtgttaaagttgcgcttccttggttgatgtttctattcttttggtcttttgtctgttttcaaacagatcaaagcacgtcttgtgaaatgttctggccccagagtagaatttaagatgcacaaagggcatgagtagacattaataaaaaactcattttgaccctttcgaactggcggccaccatggaggtcagaagagggcaggtgtattcctgccagccccctagagacataaagatgtctgccccgaggaatcaggctagggattagtgacaggctccatgcctgccccctgccacactggacagccaaacctccttctcttgacttacaggactggcaaagacagtgacaggggcctggccgtggagcctggctgaaatccgggccccagtgaaagccccacagagagctgcagagaaaggcaaccttcagaggctgactttgatatttacacttccccaatttctacggagagccgtggtctcgtgttttacacattcagcaattgcacaggccctgaaaggttttaactgtccggttgaaactataataaagtttactgtggttaaaacctgaaatgagtctgagtttggatttttcagcccagtggcttcgtgtaaacagtttacttaacgtcgtttttggctcttattcaataaaccaccatgataatcccgttcacagacaaaacagatcacggattagcagacaggctgctgtaacaaaagcagcgcattacctgctctttgtgcaaaaggtagagctccgttttgcagaaagtattcgtctatctttgttttcatagttgaagagaaggaacgttacattgtttagctcctttttgtaccacaaaaatagattttaattaagcacataaagtgagccgggcttggagctgttattttccagagaaggcatactggctttattcaaattggaagagaccccaggcaaatgccaaaatcacctattgcttacatttcattttaatgtgctcaagttcaataaaagtttatcatctccattaaaccagtacctattggaactgatttaatcttgttagcacaaagaaccacatgaaagaaaccaagaccccaggacaagactgtacatagcacagttgcgccggggtagaaattacataaaagaaatgaagcatccaccgatgacagagtgcctcacctgctcttatgtgtgtgcgcttgctcgtgtgtgtgcggagtgtacttgtgtgcacggatccacacaccctgcagtgcaggtctctggccgtctgccacagtgcagcatgctggggaggctgccaagtgcgggagtcctcagctgctcagtgtcacagcaccgccacgctcccacacggaccctgaattgtgtgacatttgaacaaacacatgtcacgtgtaggggtgctggtcaaatgtctactggcaacagcacaatgaggacatatatcttgattctagccccagagagcacacacactcacacactgtcacactcactcacacacacaaacacaggcctttctttaccgggaagagtcagtttgctctccgccttcagtattctcttttctgtcaactagaaagcctccaagagctcatggctagacatgagtggggtccaagaattcaggggtgttagatctttgattcaaggtgtggcttgacattaggacttggtcacaggggacataaatgacaagttggtggcacccacaggtgtgtgcttacctgagacggatgcaatgaggaggtggatttagtggatgatatcaggggctgcaggcagaagctgaaggatccatttccttaaaagactcagcactaaggcacgagtgggatttcttaggactcccagtgagaaaagcgctgaatggaagaagtgattttccccagttctgtgcctgtaactaactcagtggcatctgcaggaagcacagcctcatgttggcacctcagtggcttatagctttgggaacagagggttactgtcgctctcagcctgtcgtagctacagagacagtggtggggcccagctttgaaagtgacttggcaaggaacagagcctggagtggaagaacatgccgtggcacttttgggatggctgtgagactctctgaggatctcctgaaaatacgtggttaaagtttgagtgggagattggaggcctttcttatacggggtggcatgagccactgaggactgagggaatgtgaattatggtcctctgcctccatgactcagttattgaagggaatttatatatcttctatggagtgccagacaccctagtagacctgtatcagccagctcggactgctatgccataatgccacagactgggtggctcaaacaacagaaatttatttctcagcattgtggagactgagaagtccaagatcaaagttttggcaaggcaggttttattctgcagactcttctcttggcttgtagacaaccacctattgctgtgtcctcgtatggtgaagaaagagagagagagcaagagagctctctggtgtctcttcttataagggcactaatttcatcatgagggccccaccctcctgacctcacttagcctcaaggccccatttatctcccaaaggcctcatttccaaataccatcacattgggggttaaagcttcaacatattaattttgggagatcacatgcatctagtccataaaaagactctgtgggaggcaatggaccttcaagatgcttacacaacagccaggaagaaaggaccaaaacctaccctgcagaggtcagctggctgcagcctgcttctcccctctctcacgttagctcagagagcaccgctcaagttgcctcgtgtgtgtttctcaaacatgctaagttcacctgctgttcttccatcctggaatgaccttgtgctcttctaagtatggctggctttcttagcccttggctggtggtcacctcttcacagagggctctgtcacatcccatggaaacttccctctaggccccagttgctctcaattacctaaccctgttttattttcccaatacatccaaaactagttaaaggtattttgtgtatttgtttccttgtttatcattgagatgtcccctgtccttggtactatggactccatgacagtagggacctaatctctcaagatcatttgtgtgtaccccaaaactaggagagtatctggacatagtaggtattcaatatgtatgtgttgatgaatcataaatgccatagagagggtgaaaataatattttgtgggcatctgaggtgggtcttgaaggatgggaaggattttgacaaatgaacattttgagtgaggagggaaggcaacccatcctttagctttggaaggaccacatttagattaaactttttttttagtgcaaactcataagcttatttagaaagagctctttaatggtcttatttagcgtatcagaacttagaccatcggaagttctttttgaagtctgacctaaaagctgaacttcttccttcactcatttcagcccacctttatctcccattcagtagaaacgctacaaactctactcatcatccattctaaatcttcacatttggaaaaacagactctgcaagtgaaaaccagtaatgcttgtattttcaatgtcatcttttctttaaaatgatgttaaatgattctaggagtgcagatttgtgttttaggtgtatggatggttccggatatctgttaggtatactctctgggttttcatgggatgagagatagtaagaaaagtatagcaagaaagctttggaaagagccatttccctaggtattgtgtttgcaagcatcataacctcattcctgagggcacaggcactgtatctgaaagctttgctgtgcagacatccattcagcaaacatttaatggcaatgtccaggggccaggcgttgcacttggtgctgtctcatgcatataggtgaatgagacatggtcccacaagcagggcaggcgatgtgagatcagagtcctgtgggtggtgcgcaagtgcgtagaatgatacatacaaaggtggaacaagaaggttgcaaaggagtgccaaatagtatcctcagagaagctccttttcaggatgcactagaacatcagattcaagttaagtctagggcacaccatgtctgaaccagggccttctaaaactcataaggataatatcatagggacaactgccactctcctgccaggcatagtggctgctcaagcagaacaggaggtgcccactgtctctgcaaaactcaccccagcatttccctagggccatgctcctgaggtcccgttgttgggttaaggtctggtctgctcctctcagcatacagacaacataaattcaggttcaaaagcaggacagcagctaagaagagagctgactttgaagtttagagccttaggttgaagggaattctcttggccgagttacaaagagaataaaatgctgtcataaggagagtagctttagattttcactttatcttcaaaataaaagattagggacacaattctggttgagatggttaagtaggtgcctgtataattgaatttcatgctcattatttctctctgaagtggtgtacacaagcagtcattggaaagcaggtttagcaaatatattggtcagggctttgctgaactttccagctttccaaaatgtccaagttccttcagtcttcttcatgtgccgtgcgagatgtacaagacgacactgatggagccggtgagccaggcagtttcaagacaagcttctcttccattagcaaacttgtcataggattggaaagttttctttttttccacaagattagacatggtccaaagaatactttatgccgctttggatcagcaatctgcctgcacctttgacatctcataattgaggtatatgtcagagtccaaagtaagaatacatgaaagctctgtgtatgatactatcatggtgggttcatgtggttatacccttgtccaaacccataagatgaacagcactaagagtgagccctaatgttaactatggactttgggcaataatgatgtgtcaatgtgcgttcatcagtcataacaagtgtagcactgtgggagaatgttcataatcggggaggctgtgtatgtttggagcagggcatatatgggaaatctctgcatcttcctctcaatggtgctgtgaaactaagactgctccaaaacataaattttttttaaaaaaagaaatataccaaaggcgtagttgtgatgaaaagtgagggagttggccttcagtgtcccctacagggaacccttgtttcctctttgctactcaaaggttttttttttttttttaaatgatgcctaaatgaggtagttcaatgcaattgatcgaattgcctgtagtgaaaatccaggattcagtggggaaaaattctcagctccttggaaatgaccacattaagcagttggccctctggatctgtagcttcttcatctgccaattcaaccaatccctcgaaaatatttaaaaaataatgcaacaataaaaaataacccaaatacaaataaacacaatacatacagtataacaactatttacgcagcatttatattgtattagatgttataaataatctagagatgatttaaagtatactggaagatgtgcctaggttatatgcaaatagtacaccattttatataagggacctgagcatctgtggattttggtatcttcaggaggtcctggaaccaatcctccatagatacgaaggatggctatattaatgaaagcttgatttggagcaaatattgtctatggatcccatgggatggggcccctcctagggtgacagaagagtggcttcttacttggaccctgctgggttcacaatcaatttggtgacaagcgtcacaggcacatctttcctcccagagactccaaatgcagcatgttggtagggctcatcctcatattttctgttggagcgagataagaatttggttctcgtgtattgactgcaggattctgagtcttctgggaaacagaggaatggagggaccaacctttcctgagcacttacaatatgccactccctgctgtataatgggggggatgggaagaagatgtccccaagccccctggtcccccgtagaagggatgaggggaagatccacgtacgttctctgagagaggtagatgacaccatccgtaccagcacttctggaactttctctagagaaataccaggtgggttttgttgttgttgttttatgtttttgctttttccttccccatattgtcacacacctgtattttggtccatatcctgttcaatgagacaggttcaaggatcacgtgcttgggtgttgcagcaacgtcaagctgctaaaaaggtttcagggtttttttgtttgttttgtttgtttttttgagatggagtctctcagtctttcacgcaggctggagtgcaggggcatgatctcagctcactgcaacctccacctcccgggttcaagtgattctcctgcctcagcctcctgactaatggattacaggtgcgtgccaccacgcccggctaattttcgtatttttagtagagacagggtttcgccatgttggttgttggtctcgaacttctgaccttgagatctgcccgcctcggcctccgaaagtgctgggattacaggtgtgagccaccgcgcccagcccagtttttttgtttgtttgtttgtttgtttgtttgtttttaaatagactgtggatccctctgtcacccaggctggagtgcagtggtgggatcatagctcactacagctttgaactcctgggctcaagtgatcatctagcatcagcctccaagtagctgggagtataggtactcaccaccatgcctgacagctttcagttaacatgcttccttcggcatggccagtgatgcacagtgcacggctcagcaccagtctgtgcagcacgcgtcatctttgggcagcaagaggtgcgtgaccatcagagaagataagtaacctgcccagggtcatgcagcaggtaagacctgaatgtccactgtaggtcagaataactccagcacctatgctgtaggcctagaaactgccaaaaaggctgtgaaaataattctgccaaagttactagatttcaaatgaattatctatggaaagagaatggaaggaaggataacctcttacttctctcaactgtactgtcctgattctagtcaaagtaattaggcctcttcctctcatcccttccacaggggaccagaggacttggggacatcctcttcttatcctatcctctgctgcagctggcccttactcaccccttccctttaactccctcagcatagaacaaggaattccaaagtcggggcagagcggcatcagaacgacgaaataaatcatagtgtccaaagaactctcaggaatctaaacatagcaaaattattatgtttaatgtaaaaattgaacttaaaataattctgctctgtgtttaataacaacaggtatggctaaactaagccaagtcagctaggtcctcccggccaggcaggctgtcttctcttagcaaaaagataaagcaaatgagagctcttgaaggttaatagactctatcacctcctaaagaatgcaaactgtataaatattcaggttttaaaataaaatcccccaaagccagccttgcaaaatgaggtcagcttggtctggctcggcctgttggcttgcctttcagctgcacggtggtgtgtcttgtgaccagaacatccgtgacatatagatacagtctttgcctccacgttgtatattgaaactgtgaaagtagaactcccatagctcaagtttatagaaatacgtgacaatgtttgaagtagcttagctgagactaaaacagtctgacatcacagccttggggaggatgatggaaatttcttaatttctttgaaaaatttaaaaaacacagacacattcttttcaggtacttgattggccacccaagttttcttttctggttttagaaaatcacacagaaatacagagactctgcacaaggcatcccccattctaaatctcctgtgtttcacaaggcatcttggtgtcattctgtgtatcagactgtgctggcttttctccatttacccaatggatccatttaccccgtggatccattctctttctttctgctccctggaagactgattccgatggattgcatcacttgggctcccctcacctctgactttccactggatttgaccgatgggagccataagcaagagacaggaggtaaagaggggaagagacaggtcaccttacaggtggtgcctcttccatacctccaccttcttcatcctctcccacacaattccctcccattgtcccttttggtcaagagatgttaacggcttctcactgttgctggtctccaggtgactcaccttctccatctccattttttttttttttttgagacggagtctcgctctgtcgcccaggctggagtgcagtggcgcgatctcagctcactgcaagctccacctcccggattcacaccattctcctgcctcagcctcccaagtagctgggactacaggcgtccgccaccatgcccagctaattttttgtacttttttagtagagacggggtttcaccatgttagccaggatggtctcgatctcctgaccttgtgatccacctgcctcagcctcccaaagtgctgggattacaggcgtgagccaccgctccatctcttaatcccgctgatggtcccatctgtttcctattggtatgtggggtgctatgcagacttatcccttagctttaagttcctggtcaagagcttctgtttcctcatcttaatttggtattctcatactattctcatcctacaatatattgattgtgctgaggataaatgaggcaagcttatgtcattaagatcaaaaccaacatttcttcctgtctcttaagcttttttttttttttttgcattttgcttcctgtcatctgttgatgatggaagaaaacagtgctttcttattttttttcctgtttctgaaataatctacctttaatcatcatctcatttttttagcaaagtcggacatttacaatctatattttccatgtttcagatcattctgtatgtgcgtatctatacctgtttttgagtttttattgccactgcttatgttgggaggatttaggcagcccttttcagttaaaagtgagctctttggggaaagcgatgtcttccatcgttttcctcttcatcttcttacaactatcttcacttctctcttctggtcaacttaacatatgggaataatgggaagttaatgggtcctcatggcagtgagacagggggccttgagtctataatcatctctgaacccacggtggtctctgccctggcttgactgatctggtctaatccctgggcactcacatccatgtctactcacacagtccaagcccatctggccttttgcaacagcatgctcacattgactattgatatcttgctcctcaactttgctcttgaaggttttgtattctgttctggcccctctgttaataatccactggtatttccagcctctttatacccactcattcacaagagcttctaagacactctaaatctcctccacaccacatatcaagtatggaagacccaaagtctacctccaagccccttgcatagatgcccacctcagctcctgggctccacgttgctctggcacccagttaagtatgaagcattttaaatgaggcttaaaatggtcctagtatgtggccagagaagtgaggaacaaactgccctgctctggaattcccctcaaaattcacctttttttcccctattaattctttgatgatcattttaaactcaagaggatggtcgtgactcatatgtctgactttttgttcctctccttccctgtactccttccacctgcagctgtacaccctttcttcacttcctccttagacagagcgggtacttctcgcacagagtattgagttttatctactcatgaattatagcaaaacttgatatttgaatctccaaactctgcctttaaaatgtcagaggaacttttggcagtttgtaatcttttttgtttcttaacaaagactagttttcaagactctcatttctccaggaagaagaacttatagctggaggcctcctatgtttcttagttctttctctgcctttcttcttttctctacttctttcaacaaatattgattgaatgcccactatttcctctccaagcctgttttagttggagtagagaatagtgttcattcattgtaaaattttgaaagtggacttacatgtacgttagctgtgttctgctaggaagaacaagactaggataaaaaaatactgtcaggctgtttagtagaactttttttttttctccctctctctttcataagagccagattctgtgtttaatttaactacaacttatagtcactgtcttgcccctaaattggattttgattgctatggttatttagctagttggttagaggccaaagtcatagttttcattcaagtctaaattgagcctgtaaatgttttcattacattatagacacacagattttaaaaacgtttaggtccaagaaaagagaaaaaataattattaaaatctgctgggggaaaaatattgtaaatacaggatgtgatgacagtcacttggtgtgtcgttgtcagagagtggacagtactgctgtcatcttgatagcaaacccatagtatatatccccttctcttcttcctgtgggcacctctggggctcagcccctcaaccccttgcttgtcttcatgacagcagcctcctaacttctcccttaaccagcctccagtcattccccaccaatctatattctgttgagcaaccagaatcatctggggagaaggatgagcctaattttagaatttagcttggaccttataagtagtcattttacaactcaaaccacatttttgaagctaagagtttgctattaagagatatgagactcagcaagggaccattgtctactccttgccagtctccaggaatacaatataaaagggaatgagaaaaaggataagcaaaggaccgtatcaattctgtgcaacagtggaaagtactaactccattgtgagtggtatagccttgcaaacttagaaggggatgggaaaatagctcttctccacctttggaataagagtaaggctaaaaaactcacccacttgcagaggacaggtaggtaaagtcaacgcgcattgcaggctgttttcagatgaaaaggagtggctgagaccatggcatgctgcagagagcctggcttacgcaaaggggctgccactgcttagctccaggacaatcaacatttttcatttttttctgaggcatctggaaatctagattttcacgtgcaattttataactttttcatgcaaactgtgtgttggatttggccaagggacttccagtttgtgatttctggtttcgactgtaatatatctgaaagttaatgcttgttcttgggagctggtgctagtttgtgatggtagtagtggtggtaacgtatgtgattaaatagttactttctggaggccgggctcggtggctcatgtttgtaatcccagcactttgggaggccgaggcgggcagatcacgaggtcaggagatcgagaccatcctggctaacacggtgaaaccccgtctctactaaaaatacagaaaattagccaggcgtgacggcgggcacctgtagtcccagctacttgggaggctgaggcaggagaatggcgtgaacccgggaggcggagcttgcagtgagccaagatcgcgccactgcactccagcctggggggcagagcgagactccatctcaaaaaaaaaaaaaaaaagttactttctagataattagaggatgaaaagaaagtctgtgagtcatcttgcaaatgaaagggctagagatgcttcctttatctccagctgctccttcttgattattattattattattattattagttttattattattgagacagagtctcgctctgtcacccaggctggagtgcagtagccgaatcttggctcactgcaacctccgcctcctgggtccaagctattctcctgcctcagccttctgagtagctgggactacaggcacgtgccaccacgcctggctaatttttgtatttttagtagaggtgtggtttcgccattttggccaggctggtcttgaactcctgacctcaggtggttcacatgcctcagcctcccaaagtttcagctgctccttctgaagtgcccttcacccttgcccatcccctcctccatatgcatacgcataagaacagactattctgcaggactggaagtgtcaaggctttgaaatgtttgcttccatcccctggagccttttgtagcttgagtaacttagatttgaagacaagtgctgctggggaacaggccatgacttttggcatatgaccagtctgggtggatatggggtggtgtatctagaaagcttgatataaaggctcacagtggagatttgagtacagatttatttttttctgagaaaggtaaacatgaagtttgagaagcaaggggaggaaatggaactttaggaagcatttcgtatgggttatgagaaaactcatactgaacatacagttatgagggttccccctgtgttatcgtttcagtctcattggaaagactggttttttttaaaaaaggtttgaatgaatgaggtaagtgcagaatgtgatcctaagagagtgtatgcacaagagaaactgacttcgatttgaggcaggtgggcaagcatcagagtggacctccccaagaagtgaggaagatccgaaggatgggacaggaggagaggagatgggaaatcattccaggcagtggggccacaaaaacaaagcatgtggcaggaagaaacgtggggcatcccaggacctggcaggagatcggagcaggtaatagatcaagagcaagggtgtagcacagtgggaggtgaacttggaaagaggtggagccacactgggcaaagattttcattccctaagcacaaggagaatgccagaaaaaaaattaagtaaggcagacactgagtcaaaactgacatgggaaaagagcatcctggcttcagtgcagaaaatggattcaagcaggaaaaaagtggagacagtggaaccttagaaagcttatttgggctaatatatttttatctcttactatgcattagagactgttctaaattctttttagcatcgtgatggctcatttcatatgctagcttgactgggctaagggatgcccagatatctggtaaaatattatatttgggtgtgtctgtgagggtgtttttgacagagatgagcatttgaattggtagactgagtcaagaaggcctatccttactaatatggggaggcatcttccaatctatcaagggccctatagaacaaaaaggctagggaagggaaaattcactctctcttcttgagctgggatgttcatcctctcctggccttggatattcgtacttctggttcttgggcgttcaaactcagactgaatcacaccactggctctcctggttctccagttgcagatgacatattatggggcttctaggtcttcataccatgtgagccaattctataataaatttattcttatacatatgtctgtattgattctgtttctctggagaactctgactaatccaagcagaaatgtattaaatcttcacaaagttctttgagttaggtgatgtaatttggatctttgtcctctccaaatctcatgttgaaatttgaccccccagtgtttgaggtgtggtctaaaaggggatgtttggatcatggggtggatccctcatgaatggcttggtgccatccttgtgataatgggtgagttctcattctattagtttttgcaagaactgattgttaaaaagagcttggcacctccctcctctctcttccttcctcttgctgtgcgatactggctccacttcactttcccccatgaatagaggcatcctgaagtgtaccctacaagcagatcctggcaccatgtttcccatacagcctgcagaaccatgagccaagtaaaccttttttatttacaaactaccccaaacctcagctattcctttatatcaatacaaatgatcaaagatggtaggtagtatgcttactttatatatgaagacactaagacacaaagagtatgactttcccaagtttatacagcagctaactggcttgggtaaggtagtgctagtggagaagatgagaaaggaatatacctgagagatattcagaagctaagaccagggccgggcgcagtggctcacacctgtaatcccagcactttgggatgccgaggcgggtggataacctgaggtcaggagtttgagaccagcctggccaacatggcgaaaccccatctctactaaaagaacaaaaattagctgggcatagtggcgcatgcctgtaatcccagctactagggaggctgaggcaggaggattgcttgaaccgaggaggtggaggttgtagtgagccaagatcgagccagtacgctccagcctgggcaacagagtgagactctgtcacacatacataaaaaagctaagacctgcagaacttgatggattcgaaatggaatatgaaagccaggcattagagaagtgtgtgctagtggatggagggtggaaatattccttaacattgaattgctgaggaaccccaggtcacacagctaataagagaaagaggaggaatccacctaggtattcgagctcaagggtccctactccctaaccagtacattatatcacatattttaaaaaatcactcctgggaagacggaggagacatagcatagctcccaacaaacagcataattaaagtcctcattagacaattttctttcttttcttcagttcatattggaccaccagctgccagtcttctggccctggacccttgccctccacagccttcctgctactcgagggctgccgtccaccatcctggctcaggatgcctcctcatctctctccctttttttttttttttgagtcaacttatttaattctggcctgagtcatttattttctctataacctcacatcccatgcataccaaatctttctgcaaactaagctctctcaggttactaaaatgtacttcatgagggactagaaattatatatacaaagcataaacacacacacacttatatacaaacgtatatacatatatgtatacttatatatatggatgtgtatgtatagaaataatttacaaatacataattttctagcaaaaactgatatttttctattatattgctttcttttactctcattaaattacaaaataattaacagttaatgggtcctcagggaacatgtagtccaatgcaccgacttcacagaagagaaaattgagtcctagcctggggaaggggcttgtcctaatctaccctcatccctttgtgatattgcaccatcgtagtccttcctttcccaaatctctttattcctcagtccatcccaaacaccactgccagatttttcatcatctgactttcttggtcaagcatcgcagtggtttcttctgatcctcagggtaagtctaagtgtgacagtaggaggctctaatcgtaacttggctcctggaaaaagctaacatgatcccaagtttacttggccattgggtgtgtgacttgggcacttgattcttctctatgccttagttgtcctcatctataaataatttttttcgaaaggattaaatgaatagatagataaagatataggaacagatttaaataaagaaatagctattagctgtttataataagatctggtacacagtaaatgctatgtgaatgcttgttatcattatttctgttgttgataatattaatatttgtttttactctggtacttctgggcttctgtaattggttgtgctgatttttttaatactccacccacttcccttgtttcatttttgaagaatgttaatgtctgctctgtgtaccccatttcccccacccccactggaccttgtattaggactcctcattttatggggattgtttgtaaacttctgcatgttggttgtcaacagtcgaaatgccctgagggaggtctgacattgtgggtccagtttccgtctaaattgttaagctatttcaagtgccctgaatctctcttgactcagaatctaggagaatagttatttctccccggtttcacaatcaatgcaaaaatgtaggcatcaaatcagtttttattcatcaagtcctggggttagtgccttgttttttgtgcctggtgatcctaaatccatgtatttgttgatccaatagatgcaatcgaggagcattttttgtatgtaagcaccagatcctttgctaggcagattgtagggaaaagatggttaagtcacaaagtctggttgacacaataatattatacactcgtgagaccttgaacacatacttaaggataaaagaacagggacgtcataatttgcaacggttgtctattccctttgatttttttcaaagacataaccgaaatgacaatactttcatttacttttcattaatttgcattagctgacatctattggatgtgtcacaaactatgttgaactgtatattttatctcatttgaccctaaagacgaggctatgatgtaggcatttttattatctccactttaaagataagaaaactgaggcttagagatgttaagactttcccaatttcacaaagcgttggaataattgaggtattaatttgaatattatctttgaggccagcaaagtttcctcatcgtcatttttctttcttcattgttgttctttgttatcagcatttcacggacagtgaatttctttggaggctttactttagcttagtcgctatgtccttgattttcccatagttttttcctccatgaaactgtttcttcgccactcaattatttaacatatattcattaagtatttcctctaagtgaatcagtgtttaattaaaaataaccaaagtaagtaaaagtcctttgggtgccctcaatttgagcaaatcccagaactattatactagaaaaacgtggctgcttagaagcagtgtttgtaaactttcctctgccactccaacaaaagaacaaaatgtacgtttttgaaatataaagaaaataagtagccctcatgtcaaagagtgggtagtctcacatccataatcttggaaagtgtcattgatatataatgatgctttgtgatcttaaatgtctcaaaatggagtcacttatgacaagtgactcagcctccagtgaaattgctgacccctcagactgataagcacatgtatggtgataagatgacagacacctgctgtggccagacaccctggagacctgacaagatagtaaagccaaaaggcagccgaagataatggctttagacactcctgaaaagggccataaataacagcaaagaaactgaccatgaccagacgcctcaggaactcctcccaagaactctgaggccttctatctgctgcaagctctgctgggagaagaccagtgacccctctcccggttagggtgaaaatctcctatttggtgaaaacccagactttcccattggtctgtcggcctgctgatctcctcagttacgccctgtgcttcctttccccctctctttaccacctgtgtgtattgagtatatttccatgattgctggtgtgtgaaagtctgccaataaaccgtgaatttgtaagtacttaattggctatggagtcactgtgaaacctcccagcccccagtctgagttagcacaactaggccgcggatgtcagatgttgatttctcttgaaacagagaaaccggccactgataaagctctgatgagtgctctcatcagacaccagggctcttatatcaccccgaattggataaaacaacacagacacacgtggagtgcttttaaagagtggagagtttaataggcaagaaagaagggagaagaaagaaggaagaagctcccttgtacagagacagagggagcgggactccaaagccaagagaggaaaccccgagtgcgacagaaacgtggctgcttatatgcgggtggaagaggtggtgtctgatttgcatagggctcaggggattggtttgaccaggtatgtaactcacctagcccaggaaaaaactggccctcccaccctagccttttaatatgcaaatacaaggcgccatgatgttctacacacttagggatatgtggaggtggccatgttgccaggtgcgtgtgggatcaagggcaaggagaagagggcagaattgccatgtttgggtggccgcagtttctaatggccggcatttgcatattgaaggttgccagcctggctctaagagccagggctttccttctagataagaaacatttctggagctgctttaaaaagaaacaaaacttcccaaggactccttttcctatctgcctaaaataatttcttaataactcctgtaataccactatgggagtcaacatctgacaaccacaccttaaccatgtggagggaagaagtaacaacaaaaataacaacaacaataacaacaaaatatcacgagtatgccccaaaccacagaagttcattaagaagaataaaaaggtgatctagatgaagaataaatcaaccaactaagcatgaaacaagtttcttcagaatggaagttctttctgactgccatgatgaaactgtgaatcaagagagattgacaaaatataactgccaggattaactatgctgtttttacctggatgggagaagggcaggcaaatctcccagaggtaattatttctcacaatgaactgagatttatcagaatgcaaagagaaaagaaacaattcaagagccatggaagaagtgcccatgcatgtgaaaaagcatttgcacagccccctgcaagttaacctgttcattagcagtgcaagtcaacaccaagacgtctcccaccttttctgccatttgcctcttaagggagtggaagtggctccagttatgagaagaggcaataaactgatagaggatatgctcaggattctttctatcagagatgaagacttgatggcatttgctaaattggggaaaaaattcccaggcataagggtaccattgatggacatgagctgtctccctaactagatagagggaatattagcatagaaatttttacaaatgtatcataaaaaataacagacactgagttctcttacagtcagtggtgccagataattttccccttattcttcccaccaccaaaccctgtcaccaagcaaataaaaaaacacacttctgcattagagaaagtccacacggagcttcctaaagccaaggtgaataagatgaatagaaatcacattggtggccaggccaaaacacagtgagtttccctaccccttacacccacaaaagctatctagcctgaaaaaggctgatgaaaaatccattccaacttgtactcaaagaaacatgactaaaattctgcaacaaattcttactcctctaaaagaatttaaacagaccaaaaaaacttatgaaacaaagaataaataatgtaataaaacaacaagattagataaaaaggggaaactgcaaactaaagaaatacatgggggattaaaaataagggtgggagaaccactggaagacaataaacacattacaaacagaaagaaagatagaaatagctgaaatggaatcactaatataaagaaaaagaagaggaagtcctagctacagtgattatataagagaaaaaaataaagaacatttgaattggaaaggaataaatcaaattatctttgctaatgatatgaaaaaacctaaagactctaccaaaaaattataagaactgataaattcagtcaagttgcaggatacaaaattaatacacaaaatcagtagcatttctatgtgccaacattgaacaatctgaaaaagaaatttaaaaagtaatcctatttacaatagccacaaataaatacctaggaattaaccaaagagctgaaagatctttacatgaaaactataaaacactgatgaatgaaattgaagagggcacaaaacaatggaaagatattccatgctcatggattgaaagaatcaatactgttaaaatgttcatactacctaaagcaatctacagagtcagtgcaatccctatcaaaatatcaatgacattcttagcagaaatagaaaaaacaatcctaaaatttatatggaaccacaaaagacccagaataaccaaagctaccctgaacaaaatgaacaaaactggaggaatcacattacttgacttcaaattgtactacagagctacagtaaccaaaccagcatggtactggcataaagcagatacatagaccaatggaacagaatggagagccaatcaacaaatccatacaactacagtgaactcatttttgacaaaagtgccaagaacatacattagggaaaagacagtctctttaataaatgatgctgaaaaaactggatatccatgtgcagaagaatgaaactagacccctagctcacaccatatacaaaaatgaaatcaacatggattgaagacttaaattgaagacgtaaaactatgaaaactaaactaaaacttcaagaaaacattatatattatataataatatatattatatattatataatgatatatattatatattatataatgatatatattatatattatataatgatatatattatatattatataatgatatataatatatattatataatgatatatattatatattatataataatatatattattatataatatatattatatattatataatatatattatatattatataataatatatattatatatcatataatatataatatattatatatcatataatatatattatatatcatataatatatattatatatcatataatatatatatcatataataatatatatcatataataatatatattatacatcatataataatatatatcatataataatatatattatacatcatataataatatatatcatataataatatatattatacatcatataataatatatatcatataataatatatattatacatcatataatatatatcatataataatatatattatacatcatataatatatatcatataataatatatattatacatcatataatatatatcatataatgtatattatacatcatataatatatatcatataatgtatattatacatcatgtatatcatataatgtatattatacatcatgtatatcatataatgtatattatacatcatgtatatcatataataatgtatattatacatcatgtatatcatataataatgtatattatacatcatgtatatcatataataatgtatattatacatcatgtatatcatataataatgtatattatacatcatgtatatcatataataatgtatattatacatcatgtatatcatataataatgtatattatacatcatgtatatcatataataatgtatattatacatcatgtatatcatataataatgtatattatacatcatgtatatcatataataatgtatattatacatcatgtatatcatataatgtatattatacatcatgtatatcatataatgtatattatacatcatgtatatcatataatgtatattatacatcatgtatatcatataatgtatattatacatcatgtatatcatataatgtatattatacatcatgtatatcatataatgtatattatacatcatgtatatcatataatgtatattatacatcatgtatatcatataatgtatattatacatcatgtatatcatataatgtatattatacatcatgtatatcatataatgtatattatacatcatgtatatcatataatgtatattatacatcatgtatatcatataatgtatattatacatcatgtatatcatataatgtatattatacatcatgtatatcatataatgtatattatacatcatgtatatcatataatgtatattatacatcatgtatatcataataatgtatattatacatcatgtatatcatatatcatataatgtatattatacatcatgtatatcatatatcatataatgtatattatacatcatgtatatcatatatcatataatgtatattatacatcatattatatattatatttataattataataattataattatataaatatataaaataaaaataattataattataataattataataatatatattataatatatatccttgaggaatcaccacactgtcttccacaatggttggactaatttactcccaccaacagcataaaagcattcctatgtctccacagcctcactattgtaactggtgtgaaatggtatcccatgtggttttgatttgcatttctctgatgaccagtgataatgagcttttttccatatgtttgttggctgcataaatgtcttcttttgagaagtgtgtgttcatatcctttgcccactttttgatggggttgctttttttttttcttgtaactttaagttccttgtagattctggatattagccctttgtcagatggatagattggaaaaattttctcccattctataggttgcctgttcattctgatgctagtttattttgctgtgcaggagctctttagtttaattagaccctatttgtcaattttggcttttgttacaattgcttttgatgttttagtcatgaagtctttgcccatgcccatgtcctgaatatatgcagccataaaaacaaatgagatcatgtcctttgcagggacattgatgaagctggaagccatcattctcagcaaactaacacaggaacagaaaaccaaacactgcatgttctcactcataaatgagttgaacaatgagaacacatggacatagggaggggaacaacacacactgggacctgttggggggtagggggcaaggggagggagagcattaggacaaatacctaatgcatgtggggcttaaaacctagatgacgggttgataggtgcagctaaccaccatggcacctgtttacctatgtaacaaacctgcacgttctgcacatgtatcctggaacttaaaataaaataaaaaatatgtaattcaccaataaattcatagaatatgacatcacaaccaagtgcatttcattttaggaaaataaggatggttctctattagagaataataaattctctaattgaatcatcattttaattagtcaaagggggaaaagtatattatcagataaattaatgcctaaaatatatttgataagataaacatacatttttaataagaaccttttggtaaaataacagtggaaggatagtttcttgccactattttacacatacactccctaaaacttatccaaatgcttaaccaagcaattgtagacatatgcccattttcatgaagattgagttcaggaacagaaatgagatgctcatttttacttcctttacttagcattgctccagaaactccagacaatgcaattagacaagaaaatacaatggtgaggagatactaagaaagaaggaaataaaattgccatttgaaaattagataccaggaaaacataagagaatctacatggaacctattaaaaataataagagaatttagacatatccaggctttccttcgtacatatgatagctttttagaagatacatgaatgttaatcatgttaatgactaacatttttgaaatgcttcctatgtgccaaagttcttgtaaatgctttcagtgtatgaactcatttaatactctaaacaatcttacaatgaaaaaaaaaatcccatctcttaaataacaagaagataaatgccctaagaagcagtgtgatgcagtgtaggagagactaagagccccagctacccagattggctcctgtgggacctggagcaagttaacctatttgtctctctgtttccacatctgtaaactgagaatgtcagtgtacttatttcatcatgttgctgtaaaatgaaatgagttaacacatgtaaagtctaagaacaaaacactatacaagtgttggttaccattattgttaaaaataaacctagcaagaaatgtactttgcctagatgaagaaaaatttagaattttaccaagagctataaaaactttgtccttcccttttattcaatacactttaaaaaatttttatttatttctttcaacccttgccaagcactgatctttttactgcccccatagttttgccttttccagaatattatgtaaggagaatcatacaatatatagtctttttcagattggcttcttttatttagtaatatgcatttatggttcctctatgtcttttcatggctgtatagctcattaccttttagcactgaataatattccattgcttgaaataccacagtttatttacccattcatctactgaaagacatcttgattctttcaagttttgtcaattatgaacaaaactgctgtcaattggtcttcagggctttgtgtgaaactaagttttccgttcatttaggtaagtgacaaaaaggattgctggttcatacagtaagagtgtgtgtatagttttgtaggaactgccaaactgtgttccaaagtggctatgccattttacattgccatcagcagtgaatgcacattcccattgtcaaggttctggatttgggccattctaagagatgtgttgtggtatctcattgcttttttaatttgcatttttctactgacatacgctgtggaacatctttccttttgcttatttgccatatatcttttttgtgaggtgtctgttcaaatcttttgcccgttttaaaaattgtattgttgattttcttattttgttgtgtacttttcaaaactctgacattttgtatgagctctatattagatgtcttttgcaaatattctctcacagtctgtgtcttgtcttttcattctcttgatagtatctttcacagagccaaaattattaatcataatgaactccagtttaccaattctttttttcacggatggtctgaagttgctggggagggagtctgatggactaagcctttaacctgtgaggtctgcattaactccaggtagtcagtgtcataaatgaattgtaaaacacacagttggtgtctggagagatggtggattgcttactgtgaggaaaaatatccacacatttggtgtcagaagtgttgtgagattagagaagcagtcttttccccctttttaattcctaaatatattttcctttttgatactactttaaatggaattgctttctttatttccttttctgatagcaaattattagtgtaaaaaatgcaactgctttttgtatgttgattttgtatcttgctaccttattgaactcatttttcagttattaaagatttttggtagaatcttgagggttttctatacaaaaaactaggtcatctacaaacagataattttaattatttccaatttggatgccttttattttatttttttcttgcctaaatgctctggctgggacttacaatgaagtaaggagagtgggcatacttgctttgttcctaatcttagcagaacaaagcaaaaaaacccctgatcttcagtttttcaccgttaagtattatgtttgctgtaggcttctcatatatgacctttattatgttgaggtacattccctctatacttagtttcttgagcattgtttttatgaaatgatgctgaatgttgtcaaatgttttttctgcatctactgagatgattctatgatttttttttaccttcattctgttaatatggtgtattactttaatcgagttgtgtatgttgaaccatacttgcattctaaggataaatcccacttgatcatgatatatgattcttttaatgtgttgttgagtttggtttgctagcattttattgaggatttttgcacctattttttcaggtatattggcctgtaacttcttttttcctgcggagtctttatttggcttttgtatgaggataattctggcctcattaaatgagtttgggagtgtttcctcctctttagtttttggaacagattgaggagtggtactaattcttctttagctgtttggtagaattcatcagtgaagccatctggtcctgtatttttcattgttgggagatttttggtgattgatttagtctctttgctacatacaggtctgttcggtctttttatttctttgtaattcagtcttgctaggttgtatatttctgggaatttactaatttcttctaggttttgcaatttgttggtgtataaatgttcaaaataatctcttataatcctttttatctttgtggaattagttttaatgtctcttatttctgatttctttattaaatctctcttcttggtctagttaaaagtttgccaacttagtttatcttttcaaaaagttaactcagtctagttaaaggtttgccaacttagtttcttttcaaaaacttaattcagtattttttatttttctattgttttactaatctctattttgtttatttctgctatttatttattactatatttattgttttcttccttttgctaacttcaggcttagtggttgtttttttttttttttctagttccttgtggtaaaaagttaggctgtttattttagatctttcttcttttttaatatgggaatttatccctataaatttctcacttagtaatgtttttgaaggagcccatcaattttgggatattgtattttcagttttatttttaaaagatattttctaatttcctttttgatttcctctttgatccattggttgcttgaaagtatgttgcctgatttccacatctgtacattttctcactttcattcacatgatttctagaaactagaaagaaatcaataatttctagttggattccattttagtcagaaaagatacttgaccggattttagtcttttaaaatgtgttaagacctgttttgtaatctaaaatgtgctctatcctggagagggtttcatgtgcacttaagaagtgctgctgctggtgggtggaatattctgtatgtctgttaggtccgtttggtctgtagtgttgttccagtccactgttttttagttgattttctgtctggttgatttgttcattattgaaaatggaatatcgaaatctccaactattactatattgctatctatttctcccttcagttctatcaatatttgctttatatatttacatactttcatattgggtaaatatatatttataattgtaaatgttcctgttgaactgatgattcttcattatataaagtccctctgtatcttttgtgacagtttttgacttagagtctattttggctggtataagtatagccacactgctctcttttgggttctgtttgaatggaatatctttttccacctcttcactttcagcctatgtgtgtccttaaatagaaggtaagtttcttgtaaacaaactatagatggattttgttttattatccattcagccactctatgtcttttggttgggggactttattcatttacatttaaaataattagtgacaggaaaggatttacagttgtcattttgataattgctctttgtctatcttgttcttttgttcctctttgcatctgttgcagtcttcctgtgtgttttattctttatttcttttgtgtaactctcataggtatttttgcttttttggtaacttacagttataacagggtattttaagctgataacaactttaattgtgtaccaaaactctacacttttacctctcatccctcaacactttgcattattgatattataatttacatctatttgtattgtgtatccattaatatatgttttatttatagttatcttaatgcttttagttttaatttttatatcagaattaagttacccaccaccattacaataatatagtattctgtatttgtttatgaatttacctttctcatcagattttagatgttcttaagctattgtgttgctttttagtgtccttcctttttaacttgaggaactccctttaacatttcttctttttttttttttttttttttttcactgtgttaaccaggatggtcttgatctcctgatcttttttttttttttaatttttattttttattatactttaagttttagggtacatgtgcacattgtgcaggttagttacatatgtatacatgtgccatgctggtgcactgcacacactaactcgtcatctagcattaggtatatctcccaatgctatccctcccccctccccccaccccaccacagtccccagagtgtgatattccccttcctgtgtccatgtgatctcattgttcaattcccacctatgagtgagaatatgcggtgtttggttttttgttcttgcgatagtttactgagaatgatggtttccaatttcatccatgtccctacaaaggacatgaactcatcattttttatggctgcatagtattccatggtgtatatgtgccacattttcttaatccagtctatcattgttggacatctgggttggttccaagtctttgctattgtgaataatgccgcaataaacatacgtgtgcatgtgtctttatagcagcatgatttatagtcctttgggtatatacccagtaatgggatggctgggtcaaatggtatttctagttctagatccctgaggaatcgccacactgacttccacaatggttgaactagtttacagtcccaccaacagtgtaaaagtgttcctatttctccacatcctctccagcacctgttgtttcctgactttttaatgattgccattctaactggtgtgagatgatatctcatagtggttttgatttgcatttctctgatggccagtgatgatgagcattttttcatgtgttttttggctgcataaatgtcttcttttcagaagtgtctgttcatgtccttcgcccactttttgatggggttgtttgtttttttcttgtaaatttgtttgagttcattgtagattctggatattagccctttgtcagatgagtaggttgcgaaaattttctcccatgttgtaggttgcctgttcactctgatggtagtttcttttgctgtgcagaagctctttagtttaattagatcccatttgtcaattttggcttttgttgccattgcttttggtgttttggacatgaagtccttgcccacgcgtatgtcctgaatggtaatgcctaggttttcttctagggtttttatggttttaggtctaacgtttaagtctttaatccatcttgaattgatttttgtataaggtgtaaggaagggatccagtttcagctttctacatatggctagccagttttcccagcaccatttattaaatagggaatcctttccccattgcttgtttttctcaggtttgtcaaagatcagatagttgtaggtatgcggcgttatttctgagggctctgttctgttccattgatctatatctctgttttggtaccagtaccatgctgttttggttactgtagccttgtagtatagtttgaagtcaggtagtgtgatgcctccagctttgttcttttggcttaggattgacttggcaatgcgggctcttttttggttccatatgaactttaaagtagttttttccaattctgtgaagaaagtcattggtagcttgatggggatggcattgaatctataaattaccttgggcagtatggccattttcacgatattgattcttcctacccatgagcatggaatgttcttccatttgtttgtatcctcttttatttccttgagcagtggtttgtagttctccttgaagaggtccttcacatcccttgtaagttggattcctaggtattttattctctttgaagcaattgtgaatgggagttcactcatgatttggctctctgtttgtctgttgttggtgtataagaatgcttgtgatttttgcacattgattttgtatcctgagactttgctgaagttgcttatcagcttaaggagattttgggctgagacgatggggttttctagataaacaatcatgtcgtctgcaaacagggacaatttgacttcctcttttcctaattgaataccctttatttccttctcctgcctgattgccctggccagaacttccaacactatgttgaataggagcggtgagagagggcatccctgtcttgtgccagttttcaaagggaatgcttccagtttttgcccattcagtatgatattggctgtgggtttgtcatagatagctcttattattttgaaatacgtcccatcaatacctaatttattgagagtttttagcatgaagggtttttgaattttgtcaaaagctttttctgcatgtattgagataatcatgtggtttttgtctttggctctgtttatatgctggattacatttattgatttgcgtatattgaaccagccttgtatcccagggatgaagcccacttgatcatggtggataagctttttgatgtgctgctggattcggtttgccagtattttgttgaggatttttgcatcaatgttcatcaaggatattggtctaaaattctcttttttggttgtgtctctgcccggctttggtatcagaatgatgctggcctcataaaatgagttagggaggattccctctttttctattgattggaatagtttcagaaggaatggtaccagttcctccttgtacctctggtagaattcggctgtgaatccatctggtcctggactctttttggttggtaaactattgattattgccacaatttcagatcctgttattggtctattcagagattcaacttcttcctggtttagttttgggagagtgtatgtgtcgaggaatgtatccatttcttctagattttctagtttatttgcatagaggtgtttgtagtattctctgatggtagtttgtatttctgtgggatcggtggtgatatcccctttatcattttttattgtgtctatttgattcttctctctttttttctttattagtcttgctagcagtctatcaattttgttgatcctttcaaaaaaccaactcctggattcattgattttttgaagggttttttgtgtctctatttccttcagttctgctctgattttagttatttcttgccttctgctagcttttgaatgtgtttgctcttgcttttctagttcttttaattgtgatgttagggtgtcaattttggatctttcctgctttctcttgtgggcatttagtgctataaatttccctctacacagtgctttgaatgtgtcccagagattctggtatgttgtgtctttgttctcgttggtttcaaagaacatctttatttctgccttcatttcgttatgtacccagtagtcattcaggagcaggttgttcagtttccatgtagttgagcggctttgagtgagattcttaatcctgagttctagtttgattgcactgtggtctgagagatagtttgttataatttctgttcttttacatttgctgaggagagctttacttccaactatgtggtcaattttggaataggtgtggtgtggtgctgaaaaaaatgtatattctgttgatttggggtggagagttctgtagatgtctattaggtccgcttggtgcagagctgagttcaattcctgggtatccttgttgactttctgtctcgttgatctgtctaatgttgacagtggggtgttaaagtctcccattattaatgtgtgggagtctaagtctctttgtaggtcactcaggacttgctttatgaatctgggtgctcctgtattgggtgcatatatatttagtatagttagctcctcttgttgaattgatccctttaccattatgtaatggccgcctttgtctcttttgatctttgttggtttaaagtctgttttatcagagactaggattgcaacccctgcctttttttgttttccatttgcttggtagatcttcctccatccttttattttgagcctatgtatgtctctgcacgtgagatgggtttcctgaatacagcacactgatgggtcttgactctttatccaacttgccagtctgtgtcttttaattggagaatttagtccatttacatttaaagttaatattgttatgtgtgaatttgatcctgtcattatgatgttagctggttattttgctcgttagttgatgcagtttcttcctagtctcgattgtctttacattttggcatgattttgcagcagctggtaccggttgttcctttccatgtttggcgcttccttcaggagctcttttagggcaggcctggtggtgacaaaatctctcagcatttgcttgtctgtaaagtattttatttctccttcacttatgaagcttagtttggctggatatgaaattctgggttgaaaattcttttctttaagaatgttgaatattggcccccactctcttctggcttgtagggtttctgccgagagatctgctgttagtctgatgggcttctctttgagggtaacccgacctttctctctggctgcccttaacattttttccttcatttcaactttggtgaatctgacaattatgtgtcttggagttgctcttctcgaggagtatctttgtggcgttctctgtatttcctgaatctgaacgttggcctgccttgctaggttggggaagttctcctggataatatcctgcagagtgttttccaacttggttccattctccgcatcactttcaggtacaccaatcagacgtaaatttggtcttttcacgtagtcccatatatcttggaggctttgctcatttctttttattcttttttctctaaacttcccttctcgcttcatttcattcatttcatcttccattgctgataccctttcttccagttgatcgcatcggctcctgaggcttctgcattcttcacgtagttctcgagccttggttttcagctccatcagctcctttaagcacttctctgtattggttattctagttatacattcttctaaatttttttcaaagttttcaacttctttgcctttggtttgaatgtcctcccgtagctcagagtaatttgatcgtctgaagcctttttctctcagctcgtcaaaatcattctccatccagctttgttccgttgctggtgaggagctgtgttcctttggaggaggagaggcgctctgcgttttacagtttccagtttttctgttctgttttttccccatctttgtggttttatctacttttggtctttgatgatggtgatgtacagatgggttttcggtgtggatgtcctttctgtttgttatttttccttctaacagacaggaccctcagctgcaggtctgttggaataccctgccgtgtgaggtgtcagtgtgcccctgctggggggtgcctcccagttaggctgctcgggggtcaggggtcagggacccacttgaggaggcagtctgcccgttctcagatctccagctgcatgctgggagaaccactgctctcttcaaagctgtcagacagggacatttaggtctgcagaggttactgctatctttttgtttgtctgtgccctgcccccagaggtggagcctacagaggcaggcaggcctccttgagctgtggtgggctccacccagttcgagcttcctggctgctttgtttacctaagcaagcctgggcaatggggggcgcccctcccccagcctcgctgctgccttgcagtttgatctcagactgctgtgctagcaatcagcgagattccgtgggcgtaggaccctctgagccaggtgtgggatatagtctcgtggtgcgccgttttttaagccggtctgaaaagcgcaatattcgggtgggagtgacccgattttccaggtgcgtccgtcacccctttctttgactcggaaagggaactccctgaccccttgcgcttcccaggtgaggcaatgcctcgccctgcttcggctcgcgcacggtgcgcgcacccactggcctgcgcccactgtctggcactccctagtgagatgaacccggtacctcagatggaaatgcagaaatcacccgtcttctgtgtcgctcacgctgggagctgtagaccggagctgttcctattcggccatcttggctcctcccgatcctagcatttcttctaaggcaggtcttgtggtgatgtactccctctgcttttggttctcttggaaagcctatctatccttcatttttgaagaacagttttgccaggtatagtattattgattggcatttttcccccggcacttcaaataattatctcattgccttctagcctgcaaggtttctgctaaaaaatatgcacatagtcatgtgggcattcccttgtacttaacaggtcccttctgtcttgctgccttcaaaattcaaatttttgagttttgacaatttgattataatgtttcagtgtggatttctttgggttcaatttttgggggtattttggacttcaagggtctgcatgttcattctcttcccaagattaggaaagtttcagtcattatttatttgagcaaactttttagtctctctctctttctctctctctctctctcaaacttatattaatctgtttgacgatgtcccatacgtttcagacttcctttattctctttatcttttcatttttctcctctgactgaataattcccaatgacctgttttcaactttgctgatcttttcttccattcagtctaatccagtgttgaattcctccagtgaattttttagttcagttattgtattcttcagccccatgatttctgattggtactttttaaagttttttatctctttttaaaaattctcatttggttcacatattgctctcctgaccttggtgagcatctttaggatggttactttgaattttctgtcaaaaaaatccatatatctctatgttatgagggtcagtttctgaagttatcttgtttgtttgtttgaagaatatttctatgtttcttcattttccttaatactctgtgttggtgtctgcacattagacaaaacagcaacctctcctactcttcacaaactaaccttgtcctcgagaagactaccaatcagcctgatcagagattctggagatctcgcaaacctttttgctagtccctcctactttctttcttcttagtggccctcagacttctagaatataccaaatctaattagtgttctgaaacaagccaattcctcaagcaggccccacatagttgggtatttagatgcacagtgtacctcttttcctccccaagtagaagctaggagctgagatttttatctgctcattctgtgctaagctggagggagtggctatggcacctgccagcctcaatcatgatctctgctcttcttaattttgggtggctagagcatgccatgtcctgtcagcactctaacacaggctagacagaaatggttatctggctagccctcaggaaagccatgttgttaaacatggggtgcctctctttcccttcccagggagaaggcgggaactggaactcttttactcctaactctgtgctgagctagggagagtgactttggtaactgccagcccaaaacatgatctttgctcttactggccttgggcagatagactatcccatgtcctgtgtctcctcagtgccctgaagcaggctagacagaagccagtcttctggatagtcccctaaaagttggggtgttggatgtgtaatacaccattttcctgtaccagggagaagctgagacctggaaggctttgtcccaaatgtatgccattttgctgaggggaagaattgtggcaagaagatatctcacatttttctgtcaacttcagcatagctgggattgtactcaccaagggtgcaggagcttttaactagtttctggattcctcaaaaagggaatctgtctgtgaattgttattgcattagtgtattcatggggggtggcgaggaggatccagggcttcttattctgcaatcttgctcatggtattatattttaggtttcagattccactttttcattgctggtatttagaaaagtgcttgtattttgtaattaatcttgatcctgcaaatttactataattgtttattagttccaagaggtcttttgtcagcttttttggattttctgcaaagataatcatgtcattagcgaacaaaatgttgtacatcttcattttcaatatatataccttctaatttccttttcttgtctcattgctttaatgctttccttttatttccttttatgctactttgagatttgcaaaagttttaaattcttttataataaaatgtgtattttgagttcttggaaaaaatagccttcagttttcagtaagtcataatattgcagctttctgtgcaatatttacatttttgtaactattggatctttttcatctttgatataccttcacacattgtttttgctatgatacatttgcatgaccataaattttgtattcttatttcattacttttaattttcttcatggattatcacattctgctttttttcttaatttgaaaaatctaacaataaattctattttctatccatttttatgaacaagaaaatattaaaatcttattattacttcatagagatttgtcaaaaattacttactagtattgtaggatcttgactttggaccaactcttagaatttactaacttcaagtctctcatccagagagaattaccttcaatttttcatccctgaaaattgctatcaaacattttttttaatttcttacttgttttggaacttgataagtcacagaaagtttattttattattagggatatctttttattagaagatcatcactctgatggtgctctaattagatcattagtccttcatcaaaccaaccaagatctgccactctgaaaactttacctcctgacattttgctctccagattaataaaaaaagaagttccatgtatcttccacctgttcatggaagccactacttgtttatagctcttcgtgtgtttttaaacaactatcatcttccttctttaatctctctttttgaattaaacatgccagacctcgaaatattcctgggaaaagatgacttctcaacctccttattactttggttcttctactctagaaatccatttttaattcttcttttaaaatatgaacaccatagtgtgtgattacttgagacaaactgtcttggcctgcggggataactgcagtgttaaggatacctgactaagggttgatagataataaatagctcccaccaggggaataagttttgagaagcaactaagtgagtcgttgtcttttatttcctaggatggctcactcagacaggatcacacaccaaggactggaggttgtgttcagaaagttttctagtctgcatcaacactcaaaacacttgtagatggcaaaccctcaaaaaacaatgatttatacatgctcctgatggcatattgcaatcttacaatggacctctgaatttgggatctggtttatactcaagacttgtatgccacccacttccctgcagaatgactaaaactagacaaagaagaagctcatttgggaacttgacttacaaaaaccttcctcctctgatgtgtgtaataaccttgctgcaccatgtttgttgacattttaaggcaaattttgttccctttttatatgtggtggttgttgttataccactcatagtgtgattgagaacataaattctccaaagaactacagaatatgggaagaaatattaatgtttcaacccctctattttacagatgataaaatggaaacttagagagataaagggacttggctcaaggtcccttaattgtctatcctcaacggactcaggctggagtgaaatctaaatctgccattccctctaaatagttttgatgtgcaacaaagtgatggagaaattagaaaccaggagacagaaaaacagcagcaggagggagtaggcaaggagctggagaattcagtgttttataaactttaaattcccaactgctacactataattctgtcttgagagtccattataaggaagtcattttggtgacttggatgaggtccatggaagatgtgtctcagcatctaatttgtgagtgtgttatagtgagatgccattaagattctcacagcctctttggaatgtgggatgggaggatatgtttattttatagttccacagttaattctcctggtgtctagaagctttcattcattcattcactcattcattcaaacacatttgatgaatgctcatattcattttgtataacacactatgctagatgttttgcatttaaagttgaataattcaagccctgaattaaacctttaaggtaaagaaagcagctcctcactgcaaattaagaaggcttgcttttaaaactagctcattttacattgattcagaacatcagttaattgaaaaaataactcttttgcctaggaattcagtgttcctgtacagttatcaagaaataactttagcaattcctcttctaggaatttatcctaaagatatacttgcacatgctcaaagatttatatacagaattattttacaccattgtttgtagtaaaaaaaaaaaaaagattaaacacaaactattcagtaatagagaactgctatccacataatgaaaaaaatgtaggtgtaaatcagaacctgttcacatcttatgtatgatagagactttagagagttatttccaaaagatatgatattctctttctatctttttctacctccctctctcccacccttctttcttccttttttatctctttctttctcccctaactttacatttggaaaatttccaatatacaaaaaagttgtagaattgctattataaatattataaatatatacttttcatctaaatcagtaattgttaattacagacacattttgtggaactattggaaaataaatgttagacatcatggccttcatccctaaatacaaagctccagcaccatactaaagaaacttggcattgaaacaatagtatcactaaatgcaatacaaaataaaaagccacagcaccatcctaaagaagcttagcattgaaataatagtatcattaaatacagttcaaattttcttagttatcacaaaaatattatttatgacttttatttttccagatccagggtttagaatttgattaccatgtctctttagcttccatttgtctagtttggtccccctggctttttctttcataataattatctttttgaagcataccagcaagttgtctagtagaaatttttataatcaggatttatctgattgtttcctcacaaccggattcaaatgaaacatttttgtgaaaaatatgacagatatgctcttgataatgctaatgcttatttggttcagatggtgtctgccagacttttccattgtaattccctttgtatttaggaagacatctattatgaactaaattttgtccccccaaactttgcatgctgaagccctcatctccagtacctcagaacatgactgtgtttggagacagagtcttaaaaatggtaattaaagttaaataaggttatataggtgggctctaatccaatctgactggtgtccttataaggagaggaaatttgaacccacaagagataccagggacatgtgcccctgagggatgaccatggggagaggcaggaagaggatggacaactgttttgctaaggaaagaggggtcaaaaggagtcaaccctattggcacctcgatcttggacttctgtcctccagaactgtgagaaaacaaacttctgttgtttaagtgacccagtctatggcattttgttacagcagccgtagcaaactaatacgtcatctgaggtgtgttttgagaccacataaatatgttaacatttcactcagtagagtctgattgctacttcaaggaaatttgtaaaaaattactaacttgaatgataaaatcttagatttggaccagccctgcgaccttacagcctgcagtctctgttaattcttgccttaattaattaattagtacaatggatatggaaaaatagtcattttctaaatctaacctttctaattttattatttggtgttcttctgaaagaagagtcctactctctcccttttttgactttatacactaattgattttaaatgtttaatatccattattatattttggaggctgtaattactccacatctgattatcagaagccccttcgactggctcctgtgtaccttagaatgtgtgtatcagtctttgagtatttccctactttcccacacaataataaaatgttccaagaccactttttactttctttgcttttgacctagaaacagccatttccccaagatttcctaaccccttttagtgaataagagagtttagaaacgaagacctaagcactcataaggtgtactcattacttctagcatggacacagtcctggaccttgtctgtgcatagagctagtttatctttatattcttcattttaattcatcaacacaaggttcattgttatctcacccatttgaaaatttcccttctctcatataagagcccttgattcctgaccatattcaattttccaaatttatttttctctgttctgtaatgcagtcaaaatagtttaagaataactacccccatattaccaaacaacaaataaactaagaaaaattcagatttctttatagttctttttatctttaaaacatatcacaccaagggtatagagtcagaatatactgagttcgcaaggtacttgaattcatcctttttttcattctctgcacttaaatgacagcaatttgagatagagttacttcactggtttccacatgtgtccagtattaaagtttgatctcaagctctatttcaactgaaaaaggcagggtgcatcgtagtttgaatagtaggtttctatttgaattgaaaggaggaaaaattaatgcaatttttattattcctttatttgcttgcatttgcataaaaatatgcgtggatgaatatactaggaattgatccgtaactctgggaagggaattgggtgattaggagaagagctgggggtatacttttcaccgtgggatatttttacattgtgttgctttgtatttttaaatttttgaaacgtgactatattatccactaaaaataaattaaaaatgtaaaagaaaagaatctacttttgcttcctctattcttccccctcacaggccattacccaagtgtgttgatacttcaatggaggcacaacttggaggattttatctgatcccaagaaactcccaattacggttaccttgactgccttctgtcccctccactggtgaattatccaagcaaggaggctgcattttccaagccgtttgaatcacatccccaggatgtttccatgagccagccaagtgcattcttgagctgtgcctagatgtacttgttaagtttcttaagaatttttaaaatgattcagtgcatgctctctctgagctgcattttgtcacttggaacattcaacagatgtatttggctcatgtgcagtttttgattctcatagatgaggaatttttcactctctctgttcttggtacttgaggcattttcactcaaatgctctctgttgtctctccctctctttattcattctctctctctctctctctgtctctccatttctctctccatttttaatttcttcagtcttctgggtctcagttgagccccagggaccacaggtaaccctctttaggacagtagcatctctggaaacctagcatcactgccaaagtggaacaaaattcaaaataaaaacagtctgtgggcttggacattcttaatcatgcttttttccttagaagttcttttagtccaaattacatggattattatttctttcaactaccttatgccatagctgacctaattatacatttgtggttctacagtttgaatataatttggctctgccaaaactcattttgaggcttggtccacagtgtagcagtgttggaggtagggtctttaagatgaattaatgtttttctcatgaaattgggttagttcttaagagagtgggttgttataaagtgggtcaacttcctttgtgccatctctttccacacacttggttccccttctgtttctcctccatcttttgatgtggcacgaggccctcactgcaaactgtcagatgcagctgcccaattctgaactttgcagcctgtagaaccatgtgctaaataagcttcttttctttataaattgccaagtctcaggtattctgttatagcaacacaaaatgatttgtgcacatacatgtgtgtgtgtgtttgtgtgtgcgtggtggtattttagtacaatgatgattgcctgccatctgttgttccagaacttagaaatacaaactattttaaaacacagagaagaaaaacccagacactttcctgggggtgtggggtggaagataatttttagaggtctggctgggggcaggggtgagaggagagctgaaaggaggtatgatgtaaacacaaagaaccctatgtcaagtgtcaggttacctgtatttgcaacctggcttttatcattttgctttttcattaatacacacacgctttcgctcatttattcaacgtttattatctaccgtatgcaaggcattcttttgtatggccttaactaagccatttaacctctaagacatatattcattttttaatagattttatttgttggaagagatttaggtcacagcaaaattgggcagaagatacagagatttcccatatgctccctgcccccacacatacatagcttcctccattaccaatatccaccagagtggtacatttgttaacaatttattgacaatttattaacacataatcacccagagttcagagttgacattggggttcactcctggtgttatacattttgtgggtttggacaagtgcataatatgtgtctacaattacagtatcacaaagagtagtttctctgtcctaaaaatcctctgtgctgcacctgtttgacatcctcacccaacccttggcaagcactgatctttttactttctccatagttttgccttttccagaatatcatgtggttggaatcataaaatatttagtcttttcagactttttttttttgtgagacagagtctcgctctgtcacccagactggagtgcaatgatgggatctcggctcactgcaacctctgtctcctgggttcaagcaattctccctgcctcagcctcccaagtagctgggattacaggtgcctgccaccacacttggctaatttttgtattttttttttagtagagatgggattttgccatgttggccaggctggtcttgaactcctgacctcaggtgatccacctgcttcggcctcccaaagtgctgggattacaggcatgagccactgcgcctggcccagactgacttgtttcacttagtaatatgcatttaagtttccaccatttatttccatggcttgatagctgttttttgttttttttttttgcaccgaataatattccattgtctggatgtgaggtaaaaggtgggactcgactctagaggtgaggctcagactgcagaccagattgaggactagctgaaatggaggaagcaaaagcacctctccataagacatgcccaccagtgccacatcagtttatcattgctatggcaacacccagaagttacctcccctttccatggcaatgacttgattatctggaagttatgccccttttttttctggaaatttctgcataatagacccgttagtttgcatgtaattaaaagttgatataaatctgactgcagagctgcccttgagctgctgctcttgatacaccatgtagggagtggttcctctctgtaggagcagtcacggagctataacactgccaccttaataaagctgtttccttctaccatcagcttgttcttgaatttttgcctaagtgaagccaagaaccctccaaggccaagccccaatttgggaattgcctgccatgcatcaaatgttccgcagtttatttatctagtcacttactgaaggacatattggttgctttcaagtttttggcaattgtgaataaagcttctataaacatccatgtacagatttttgtggagacagtgttttcacctgggttgataacaaggagcatgattgttgggttgtatgatatgagtgtgttttgtttagttttgtaagaaactaccaaactgtcttccaaagtggctgtgccattttacattctcactagaagcagatgggagtttctgttattccacatcctcaccagcatttgatgctgtcagtgttttggattttggccattctaatatgtgcatatttgtgtctcattgttgttttaatttgcaatcccctgatgacatgttatggagtatcttttcatatgcttacttgccacctgtgtatcttctttggtcaggtgtctgtttagatcttctgctcatttttcattcaggttgtttgttttcttattgttgagttttaagagatctttgtatattttatatgagtcctttattggatgtgtcttttgcaaatattttctcccagtctgtggcttgtcttttcattcttttgacagtatcttttgcagagcagaaattgttatttttcataaagttcagcttatcaattcttcctttcatggatatatattcatttttaaaatggggatagtattacctgatttacatatctcctagttctttgtgtgataggtgtggtatgagggtgctttctttcttttttaagaaatgtggtggtggtccacgtctctgttccatcaaattctattagcatggtcatattttagtcactgaaatgtgacatattaatccaggtgtaagtttcaagaggcagcatgaactctttattttctgtcacagatgctggcaatgttccatggagtagatactatatatcagcctgagtcccagagtaggaatatcttggaacacagcccttggcccttctacaatggatacatagcatgagcaagaaataaaccctcatcactttaggccactgagaatttgaggggttttgttatcttagcaaaacccagcctatcctgtctgctacaaagaatcaggaagatatgataacttcagatgatgtggagtgctgtgaagtaagggcatgaaattgagctgacaagtgaagtgagcttgggcccatgttggctagatgaagatcaaaaccctctgtagtggctccaactcttgccacaagatgtgaagaaaaaagaatgagactggagtcctctggggcactggctctagatgctggtgctatccagtaggttatctaagtgaacagataatgctgaatttcttggatggtttacagtctaatttttagagcataacataacatggaagtcaactggaaccagaggaaattttagtagaaattctgctttcttcctttagatataaaatggttttcatctcaaggaaggttatttccattccaattaagtaaaagcaaggaatcatggcctgaaagtagtatattaattatttaaacctttgagtaattaatttctgatcccaggtcccaaagagctcattgtggggcactgcatttctgagaatgatgagaatgagaagggagagcatatttattaagcatatattatgtactaactttcattctaggtttttacatgtattgtctcttgcgtcttgatatcagaactctgagtcttaggaaaacaagatgcaaagcagttaaacacttgctaaaaactttatctagtaaatgacagaggaggattcaaacccaggtctaggtgaactctaattcttcagctttttgcagtatccacttctcctactccgtaagttgttacttaggtctaaaaagtgaagaaattgaaatagaaattagatctacagaggcccagaggaatgaattattacttgaagttttaaataattaatataccacttttctgagcactttaaaaattctgaatctagggggtagagtttgcttccctgaaaccgaatgttgggccttgaaacagtcctccagcacgttgcagagaagctactggcaaactgaagtgtgagaatgaggatgacaaatatgtgcatggctttatggtggctttgctgcagggtgcaaagttatcttctgtgacctctttggaccacactggatgatgaacacccaagcaaaggtaaaactggctctcctacttgtcgggcgactatgtgtaatggtgttattcaacaaaaaagagactagactaaactgcactcactcatcaggataatcatacaaacttctgctagacttcttggacaatatgccagcaagcattctttggggtcaggtttgttcaacaaagtgttgcctgatttaaaaaataataataataaaagtaagaggggaaaaaaaggccctgctgatagtaaattcatgtcttaggccaataaacacatttgttaacgtaaaataacaacaataaggcagactcataaggctagagcctctgagtggccttgtaacttctcagtaattgtgtaaaggctcatcagttcagctgagggctgagatagaaaccaacaatcgcaaacacaaacctcttggaagagcttaaagatttagcaatggaacatctccaattttccatcttttatttaactcctttgaactcccactaatttccaggcaacacttggaattccatttttagctttgccttttgaattattatttttttccccttggtgtggtgcaaatctgcgtaggaagatggtctttctgtttcatcaatttttttttcttgattgttgaggaatgttcattgccagaatgatttaaaaatagagactaatttgaagaagaaaataaaagtgatctgtaatcccaccattcagagacaagcgctattaaggttttggtatatttccagctgggaatttttttttttttctaaatgtgtgtgtacttttttttttttttttaaacgtgactgacaatatgctacttagagagtttcttgtggaggaggaagtcaggagcacaggctttgtgtcgcttgggcctgcgtgcagagcctggctctgtcacttagtgacttgtgggacacaggacaagccataaggatctgttagctcaatagtgtcttgactactaattgcttataggtatattgaagggtaaatgataaaataaatgtaaagcctttaaaaaaggtcgctggaatttactgaacactgaataaatgttagctattaccatcatttcatttttgcccttaatggcctgttatgaaactttcccattaaagctttttttcacaatcatgatttttttttctttctttgagacagagtctccctctttcgcccaggctggagtgtagtgacgcgatctcggctcactgcaacctccgcctcctgggttcaagcaattctctgcctcagcctcccgagtagctgggattacaggcaactgccaccatgcccggctaatttttgtatttttagtagagacagggtttcactatcttggccaggctggtctcgaactcctgacctcgtgatccacctgcctcggcctcccaaagtgctgggattacaggtgtgagccactgtgcctggccctgcaatcatgatttttaatggctgcattaaattatattttgtagatatactagaagttaattattcgtctcttattgaatatatatatttggcttctgtatatcatgttgcaatgaagatcttaatagaccaatcttactttggtgtactatttcttatgttcctaagattgtttcttgtgagtggaataacagggtaagaagagtgttaccatttcaaagttcttaatacatatggaaaagttgtacttatttgcattctcaccaggactgtgttagcaggttcacattcactgtgagggtcaaccttgagtattttcacgcaaccctattaatatttttaccttaaactccagactacatgttaaataacctttgcattttgtacatttttatcgttttaaaggaggttgtatttaatttgcaattacatttatttagttaaattttgaaatcacatttatttgggtgaatcattgcttttgacagacaacatccaatcttttgtactctgattttaccaatgtcttagtttggttttgctgctgttaaaaaaaaaaatacccgagactggataatttataaagaacataaatttattactcacagttttggaggctgggaacttcaaggtcaaggtgccagcaggtttggtgtcttgtgaggacacctctctgcttccaggatggcgcctcgttctgtctcctgcagaggggatgaacgctgtgtcctcatatggactcaccacttcaagaccttttataagatgctaatcccatccatgagggcagagccctcgagccttaatcgcttccttaaggccccacctcttactactctaacattggtgatcaagtttcaattcagtatgaatttgcgaggacacattgagaccactgcaaccacactaggatctttaattttctttgtcactcagtcagaacatgttaaactatcgtggggttttttttttttttcaaataaagttccgggatggtaagatttcctaagtaccttgtttttgttttgtttttttcacacatgagaggcaacttgacttgacgtaaaattcttgagttaaaaccaccaaaaatgatttgcctctaacatgccacattatatggtagaatgagaaaatgtataaacaaacagttgctttttctccccaagagctaacagaattcatacaactctagaacagggctttccagtacaactttctgcagtgatggaaagattttctagtctgcactgtgtggtaaggccaccagcccagtgtagctacctgagcacttgaaataaggctagtacaactgtggaactgaattttaatttttaaattttagttagtttaaatataaatacccacatgtaggtagtggtttccatattgaacagtccaattatagaaatatagaatagaaaggaaccttagtggttcatgttaattttgctgccttgaggatgtcatattacctttctggacactggtttcctcgtcaatgagatgatataactttctcaacgctacataataagttaatgttaaatcttagacaagagtcttacacaacccttgtctcagtattgtttctttcatgtcatggtgcaattgatttgtttaaactctgagatatgacgctgaacagtaaattaggttgaatttttgtttttttgagacagggtcttactctgtcacccaggctggagtgcagggacatgatcattgttcactgcaggcttgaactcctgggcttaagtgatcctccccgttcagcctctctagtagctgggactacagccgtgtaccaccacacctgggtaaatttaaaatttttttggtagagatgggatcttgctatgttgtccaggctggtcttgaacttctaacctcaagcaatcctcctgccttggcctcccaatagtctaggattatgagtcaccatacctagcctgaactttttttttttaattcccaaaacttccaagttaatagctttggtatacctggccaccctacctcaaatggtattcttagttattctttattcctataacctgattaatttttctttattactacctgaaattatgtgaagtatttatttaaacatacatttatctgtcctcccactagaaggtcagctccatggatgcagggattgtgcttcttactgtatctccattgtctatagagggctggatgcatggcgggtactcaatacatctttgttaaagtgagtagataagtgaaaaatatctattaatcaagttcagtaggggaaggtttacagttggaactatgtgtgtaagggagtcactttctccaatcagatagagtttttggtttgcagttagcagttttaatttgagagtttatctttgtgagctctgcacttgtaacattgggtagacatgctatcatgcagaagcattttctctgcagtgaaactgtcagtttcaggggacagctatactttaatttttattattcccactacatttgggtcaaccttggaagaagatggtgatgtgttcatctaatgaggtgactgaggcctggcctaggaagaccttttatttcctagaatcattttcaactgtgtgattttgtaaaatgggggcagtactaactccgtaatattattgtcacaaagaatcaatgagataacatatgaaaagcatttggtacaatgcctgtcaacaagcgttgtctactctcacctccctattctgaccctaaaattatactcaagtaagtggaggagcagtcttaaatctggactttctatctcaaaatactgggctctgtgtctctcaccaggcttggtcctcagcttatctgcttaatcatcattcagcataactaagttagaggggaagtggagttaagggtggggattgatgacgctgatggattgttccaggccaagtcttccaaatcctgtcgagcttgcacattgtgtataggcaaggccctaaccctaatcctaaccttaactgcctgactaggcaggctttggtcagtctgacccagcaccttgccttgtctagctgcgtgtctactctgagagtctataaatgtggaggaggccttacaatgaaacccttcacaatggagtgcctggattttattgagaaaagccaatcccctcccatctgtcatttggcacttagcactgtagttattctagatgagtgaacacttgtgttatattttccaatagcaaaactggggtcaccagggtgcctgctgttttagccgaatccagatggggttttcctataaacaagtgcacatggaatatttatgctgcccgtggcacctgacgccttaatacttaggacttctatgtagtagccactcttcctataagtcactttagcacactaagtaaatattttaatatagccatgtcactgtttattatagaatggcttgcacccagatcttgcctaatgcttggttaaaaagtcagtttataccatcctttaaagtgaatcaaagaatgcataaacgccactcttttgttactcagaactctgtttactttacttttctgtaaaccttgtgaaatgcttgcttacaaaaagctgacagatgccagatttgctcattaactggaggtgttttccaagtcaggaaggcgaggtgtgaatgtgggaggtggatatcttctccgaggtcatctcctggtgtcccttgtccaagaggcctgctaatctgttgacccataaccgccaggcagtaaacgggactgagaaataccaagtaagagtagtgatttatatatcaaccgtgtcctttgccttgggacatgtatactacaataaggaccacttggactgttggagacctggaaggactttgaaaaactgaaggtacctctgtcaggtattcatttaagacaagtgataatactccttgtataagaactttgtgatatttaccaactctcagtagcatttgatttctaagccttccactgaagattgggacttttctttaactggtaaggccattgaagttttagtttctggctatctgacacatttagtgcttatgctcttggttaactaatgagtgtgtagtggatactttagtgcataatataaagtcaattataatttttatattaaaattagtgtttaataaaacaaaattatgaattggttaactttgacgaagaaacaaacagagatacaatctatggcaagatttaaaggaatagaactttttaagaatgaagtagtaggctcttcttagcacgttgtcagtcatttccttgagtgtccacccagagcagcattcacaaaagatgcaatgaagctgttttgggcaaacaggagaatggctgcatcctagtggtaatttccattggattcttatttattgtttttttttttttaatcagtacaagatgtcacttttgatttgtaaaactctcttcgtgagtacttaaagtgcatctccatggaagttctgtttatatgaaagtcatgtttatttgcatttgttgtaccagccctgcatcccaggaataaagcctacttgatcatggtgaatcaactttttttgatgtgctgctggattcagtttgctagtatttttttttttttttttgacatggaatctcgctctgttgaccaggctggagtgcagtggtgcaatctcggctcactgcaagctctgcctcctgggtttacgccattctcctgcttcagcctcccgagtagctgggactacaggcgcccgccaccacgcctggctaatttttttgtatttttagtagagacggggtttcaccatgttagccaggatggtctcgatctcctgaccttgtgatctgcccacctctgcctcccaaagtgctgggattgcaggcgtgagccaccgcacccggcccactttgccagtattttgctgaggatatttgcgtctttgttcctcagggatattggcctgtagttttctttcttgttgtgtctctgtcagattttggtatcagagtgatgctggctttgtagaatgagttatggaggagtcctttctctttattttttgggaatagtttcagtaggatttgtagcagctcttctttgtatatttggtagaattcggctgtgaatccatctggtccagggctttctttggttggaaggctttttattactgactcaatttcagaagttgatactggtctgttcagggttttgatttcttcctgactcagtcatgggagtttgggtgtttccagaaatttatccattttctctatattttcttgttgtgcacaggggtgttgacaataatctctgaggatcttttatatttctgtgggatcggttgtagtgtcacctttttcatttctgattgtgcctatttggaactttttctctctttttattttattttttagttaatctagatagtggtctatctatctggttgattctttcaaagaaccagcttttggttttgttgattccttgtatggatttttgggtctcaatttcattcagttctattctgattttggttgtttcttttcttctgctagcttttgggttagtttattcttgtttatctggttcctctaggtgcaatgttacattttagtttgagacctttttaacttcttgatgtatactacaataaaacaatatggtacatattgttttggttactatagccttgtagtatacatcaacacaaccatctaccataaagacacatgcacgcatatgtttattgcagcactgttaataatagcaaagacatggaatcaacctaggtgcctatcgatggtggacttgataaagaaaatgtggtacatatgcactatggaatactacacagctataaaaaagaacaaaatcgtgtccttggcagctggaggccattatcctaaccaaattaatataggaacagaaaaccaaatattcaaatatgctaaacatcgtgtgcacatggacataaaggtgggaaaaatacatgctggattctaggggctactagaagggggagagttggaaggggacgagggtcaaaaaactatatatcaggtatcaggctaactacctgggtgacaggttcatttatacaccaaacctcagtgacacctaatttaccaacgtaacaaacctgcacatgcatcctctgaacctaaaatttaagatgagagaaaaaattattttaaataatgtttattattttttaccatttgtactgggcagtacaatgtccccacacacagatgtccatgtcctaatgtgtgacatctgtgaatatgttacactacatggccaaggggaatcaagattaaaggttgctaatgaaattaagattatttgtcagctgactttaaaatagagagattatcctggattatcagggtgggcccaatataattgaagtatccttaaaagtgaaagagggaggcagaagaggaggtcagagtgttctgatgtgaaaaggactcaacctactgttgttggctttgaaaaggatcagaagccaaggaaagtggctagcttctagaggctaggaaaaacaaggaaatgcatcctcccctagggcctccagaaaggaacgcatccctgctgacaccttgggcttagtccagtgagatccatgtaggacttccatcctagcaaaatgcaagattacaagtttgtgtagtttaagctgctacatttgtgataatattttacagtagccatagagaagtactgcatcatttaagagagaaaagatgtgcatgttaggaaatagcaaaatgtatatagaatataatagaaattaccattttgagcatgcacaaagatatttaatgaatgtatcttcagttctttttcactttgcacacattattctgaagaatatagagtcactttgttgcctcatctacttttatcacctaacattttaccgtgagcatttccccatttcaccttttaaatattatagaaaacatatattctgtattatgaatgacacacaatttgcgtagccaattacctaaattttatttctatgacaaatatatttgtacattgctgataatttttaagtaaaaatttctagaattaaaattactaacaaaaaagaatggatactattggtttcaaaaaatatatattatcacattgtcctccagaaagactgtattagtttgcacctcacaggcagcaaataattgtatctgttgacaagcactgggcattattagttttgaaaatccacgttgaaaggtgaaaaagagggcctaattggtttaattattatttatttgatggtacatgaagttgaactctttactatataatgatgatctatgtgtttcttgctttgtgaattgcctgcttatgtcctgttgttttgaaatgttccattttcatattggtttgtaagaattatttatatagtaaggacagtaattcattgcctataccatatggtataagtaattttttcctgattatttgccttttattcacttacattatttgatgatgtattatttgatctctgtgtatatttacacacatctaaatatacattatttacactaacacttacttaaaaatactattggaaattgcacatcataatcttaggaaggaaccaccattatatatgttggcatctatttgaacagactgtttccttgttttcatacacacacacacacacacgcacacacttatatgtatatgcatatgaatatgtaaaacataatcatatataccattcagtgatctttttttaacatttgacactagataaatttttatgtaaataaatcttgatcagtatttctcacgattgcactaagtattctagcttattaatataccttatttagcattaatataccttatttagtatttaatgaatcctctattaatatttcatctgcttttgatttttcagtaccattactaatactataacaaagcgcactggggaaggcagagaagagagataatgtgtaacagtagctattgcttaggtgccaggcactattgttagcactttatgttaatgtatattaacccatttaggccgctacaaagtccattttggtattttgctgggttcctattgttctcttcctcttttaacacatgaggcagtgaagtcatagacaggcaaagtcactgcccaaggcttccctgggttacctagactgcaggcaaatgcagcattgtctgccagatcacctacttgctctagaatagacagttcacttgtgtgcgctcttagacagaaagatgaattgctccataggaaatgttcaaaggcagaggacactcaatgaccatcaggaacaacatttttagattttacatataaaggagatcatgaggctgggcacggtgggaggccgcactttgggagcccaaggtgggtggattacttgaggtcaggagttcgagaccagcctggccaacatggtgaaaactcatctctactaaaaatacaaaaatcagccaggcatgatggcaggcgcctgtagtctcagctactcaggaggctgaggcaggagaatcgcttgaacctgggaggtggaggttgtagtgagcctagattgtgccattgcactccagtctgggagacagagtaagaccccttctcaaaacaaaaaaaaaaaaaaatgaaagaaagaaataaaagagatcatataatatttatctttccccttctgacttatttcacttaacataatgccctcaagatttatccatgttgttgcaaatggcagaatttcctttttaatagctgaatcatattccatcgtgtatatacacatatacatcacgacttctttacccattaattcattggacattgtttccacattttggctattgtggataaagctgcagtgatcatgggagtgcagatgtctctgtgtgctgctgatttcattttctttggatatatacccagaagagggattgctgggccatatggtagttctatttttaatttttcgagaactcataggaacagaaagcggaacagtggttaccacaggcagagggttaagggaaaagagaagatgttggtcaaatggtataaactttcatttataagatgaatagtttcggccgggcacagtggctcatgcctgtaatcccaacactttgggaggctgaggcgggtggatcacctgaggtcaggagttcgagaccagcctggccaacatggtgaaaccccatatctactaaaaatacaaaaagttagccaggcgtggtgttgggtgcccgtaatcccagctatctgggaggctgaggcaggagaatcgcttgaacctgggaggcggaggttgcaatgagccgagatcatgctgatgcactctagcctgggtgacagagcaagactctgtctcaaaaaaataaaaataaaataaaaggatgaataatttcaggacatttaatatacagcacagtgcttatagttaatgatacttaattgcatacttgaaatttgcttaagtggtctcaccacttaatcacaaaaaaagagtaactagatgcagtaatagatgtgtaggtatgttaagtaactggattgtggtaaatcattttacaagagatatgtatatgaaatcatcacattgaataccttaaaatcatagaatttgtcactttactttaattaagcttgaaaaaaattggcaaaaaatctatgagaagtaaaataagccagtcacaaaaaagactgaaaaaaaagaacgacagtatctaatattcagtgttattttgtctcctgctattggaaattgcacatcataatcttaggaaggaaccactattatatgtgttggcatctatttgaacagactgtttccttgttttcacacacacacacacacacacacttatacacatatgcatatgaatatgtaaaacatcatacataccattcagtgatctttttttaacatttgacactctagataaatttttatgtaaataaatcttgatcattatttctcacaattgcacgatagtctagcttattaatacaccttatttagcatttaatgaatcttctattaatatttcatctgcttttgatttttcagtaccattactaatactataacaaagtgcactggggaaggccgagaagggagataatgcgtagcagtagctattgcttaggtgtcaggcactattgttagcactttatattaatgtatattaacccgtttaggccgctataaagcccattttggtattttgctgggttcctatttttttcttcctcttttaacacatgaggcagtgaagtcatagacaggcaaagtcactgcccaaggcttccctgggttacctagactgctggcaaatgcagcattgtctgccagatcacctacttgctctagaatagacagttcacttgtgtgcgctcttagacaggaagatgaattcaaatagcctcaaatattcaggaaaataaattcacacaataattatatgtgagttgtgcattgaggaaaaaggagagggtgggtgtatttctatttgggggagaaacagagcagagagagctgctacaataaggagaggcatccaggagtgaggttgggaacagtcagcatgatcagaaagaagttatgggaaacacacgtgctgcaggatatcttgatatttacaatcagaaggaggaccaggaataatggaaggcttgaaggtattgagaaaataattgcaatgggacatgaagatgttttactcctggtgatttttggagctatataacgagacatacttctctaacatacctacttcctttatagctgcaggcaacatgcttatagttaaatcaccctagatactgatctctagaaccatttatgtttttctattttacctaaatagggcctcagctaaaaatatgaggtgctagttgaggtccagattttaaatcctgtcttcttggtttggtcttctttatttcttcttttcttttaatattagcacttttttagcttaaacatatcattgttcatcttttatttctatattttcaccctaagcccactttctccctcagattgttagtcttattgcatggaaaccacgtttttttgctctcttgagtgagggaaatggaaaatgaatccagcccatggcacagcctcagggatttggagatctgtgtagaataatttcattcagtttacatttaatggcatatatttatgtgttttgcagtttcttttatgaattaagttactgaccacagtactggtgtaggactgtgtacaaagtcctggtgtagtttctaggtaaactcctatggccactgtatcagcttcattgagacagcagaattcagggccagaggtcacctcatatcaagacatgactatgtcctgggtcacccagcacctgaggattgacatgtctcaaaccaaaagtaagtctatggaaagttcttctaaatctcacaatgtgaaagaaacattatgtagatttcccaaatgtataacaatcttaataatttctataatattactaatgttcttgggaagctaaaagaaacttttcattgtcattatttgaaaaggtgatcaaagagtgtacagtcaagaaatgtagggaaagtatcatgataggcagttaattatttttaaaatattaagcacaatttttgggtgtttatgatgtttgctgtatttgtcaattttcaaaatttttaatctgttgtgatttattttctcactctaaacaaaaatctcatttgtggctaagtttatattcttttacctaaagaaggtccacacattgtataagttccagactcaagataacctggatctgcctatctagtgggttgagttcctccatctctgagtctggggccacattttgtgggacttcagagagtctgatctcttcttgaggtagattcatagatgtcttcttgaggtagtttcttcataaagcaaagataagctgcatcataaaagtagggcctgcacaagtttttcttcacctaattctgtctgtcatataagaaacccagttctttccatgtctcggcattaagttctctataaatttaatttgtcaaccagactgtgaagtgtttttcttgtttgagtcttgttgcgattttagtgaggacctgggaaatgctacctaggaggatattccttagatactctttgaaaccagaagtctcactgtaatcttaattcccagttggaacatgcataagacatcttgtagaattgtgtcctgtttccagaaattactatttcctaggaagacattcattctgcttatccatatcagcacttgtattctgagctgtggaatccttttcatagatctggtggttttctgtctcgttaacctgagaaggaacaggggttgggaggaaacacttatttactccttttggttttctttattgtctttgtttttgagacagagtctcactctgttgaccaggctagagtgcagtggcgtgatctcagctcacagcaacctccgcctcctgggttcaagcaattctcctgcttcagcttccggagtagctgggattacagtcgcctgccaccatgcctggctaattttttttgtatttttagtagacatggagtttccccttgttggtcaggctagtttggaactcctcacctcaagtgatcagcccacctcggcctcccaaagtgctaggattacaggcatgagctaccatgcacagcccttatttaccccttttggacattaaaatgggtcctttcagagactgatgtaaatcctggttaaatagttccagtccagatggaagaagcaaagaaatgttgaggtttttaacagtttaggtttcggtcgatggtcgttttgactttacagattcagagatccagaagcctggggaagaggagggtgaccaaagctggaggcaacgtctcagaaaatgtcacctcttccaaagaattgttttgctgtttttttgtttgtttgttttgcttttttttgctgcagcagtcagcagttacctggaacagagaccccattattggcaaggcatcaccttcattctcattgggatccagccattatagtcatcctgttttgttttgttttgttttgttttgtttctttttgtttttgtttttgtttttctggtatgtcagccaagatcaagggtaaggagagatagtagcattatgagcttcccattcagggtcaactttagtgccaaggaactggagatacatcccagatgtggcccttgactgtcccctggctgtccttcaccttcagcatgccccctctaagtcatgaagcttgcagtagatctgctatgagttcttcccttttcctccataatgctgcagtttatatatcagattggctttgtttcaatatagactcatcaaccttctattgtaatagcaattcctcaaagtttctggcatgtattagattttctcttgtttcgggtgcttattcattgaaccattcattcactcattcatttgagaagcttttattgagcgcttactctatgccagtcaatctctgttttagaagcttgggatgcagagatgaatttgaggaataaaataagtccttgcactcatagagcttacatgcttgtggaggaaggagacaataaataataaacaatgagtgtgtatcatatttgatttattctaagacagtttcacgttttaatatctctgagattgggatgtattttacaataatgacatcataccactgctggcagataggcagcagtcatgcaattctcactgcattcatgtgtgcaaacttggctaaagctatagtagtgtcatcagttcaattgagttacctgtgtatatttgctggtgccgagcttcattgtctttgaaaatgtcttcaaaaagattaccttatgatttagctttgaaacgaaaagtgatcatgtagacagaaagatactacattggggcagaaatgtgacattcggaaagcaaatattcattgttggaggaatgaacgcagttttatattttcttgcaaaacaacagccaggctttctggggcctaagggataaaacatgtccataagtagctaaaacctttcctaattcaaacagtgcaagtgaatgttaaagaaattgaccaattgtccaatacagatgaaaaatttcaaggccctgtgaaactgatatgaagatgataatgtgacataatggatatgttcattagctggattgtggtaatcatttcacagtatctacatatacaaaaacatcacagtgtacacagtaaatatatacaatttttatttgtcaattatacctcagtaaagctggagttgggggatagaaaacattagggtatatatagatgctgacaaccaggttatactccaggagaaagaaactgatgatgcaggaagggagggtagttgtaggttgggatcttccctcagtatcctgggggcttttattggaaatatgaaaggggtttggaagacacctgtattctcatgtgttctcattttcttcttacctgcgattctatttctgttcagaatacaagagctttgtgcctatttcaagctgcttggctctcttctactctgattcccctctgcagaactccacattgctctagaacgcagtgcctcggtgcctggaagtaccctgtggttgtccccatgtttaatcctatttatctttagctctttaaccctagaaataaacatgtaattgtcatggaaaatgagttctaaggaaacagaatgttatagttcagcaagaggcaatgagtcacacatttatccagctttatagtctcctttcaggttgagccgtggtccctgaagtcctcaaagatatttaacactccctttttttgagggtgaagtaaataactggcaaaataatgttgccatagatcttctctgaggaaattgcagcacagatggagtatccttaatttggaaatccaaaatgcaaaactttttgagcaatgatatgacactcaaaagagatgctcattgaaacattttggattttggattttcagatttagaatgctcaaccagtaaatataatgcaaatattccaaaacccaatatctgaaacgcttctggtcccaagcatatcagataaggaatattcaacctgtataacttttatcttaaaattattttgctgaactcaaagtcgagtttcaaaatatactgtagtgctcaacaggtcctgttctccctttcatcaaccatattgctcttctccactttttctcttctttttcacattctgtgaaagaaaaaagcatgtttggaccaagtatacctgtgaaacatacaaagaaggaagcacaggtattacaattaatcatgagaataactctatctatttgtaatatttatataatgagaataaatgtgtgtgtatatttatatgtatgtatgtatttttatccacgtgtgaggtttaatacctgctcaactgaatcacaattttggttgtgaccccagcgttcatatgatttgagtgactgatatgaagaaagactgaaatggttaactacatacagttagacttcttatttcataacttatgaactgaccactgtttctcacttccaatgccttaatccacagcagaaagtctgctgggagtccaggcctccccacccaccccttcccttgccacaccattgtaaatggctccctctaagccaagagaatgtgcttcttggcataaaagagatgcctccttccagctaagccatcctccaaacgtgctgccaaagaagaccattgagttctttcaccactatgtcaggcctagaaagaagtacagggtccagaccatctggagaatgactactggagctccaagggccccaggggcaggactggtctctgtttgaattgggaattctggaacactggagttcagagccaggagccacttgttcctctgttccgcccttttcctcacttctccctttcactctcctccactttgcagcccttcagtgtcctttctcttccagtagtttctccctcccaccatctcacagcaggactcctctctgtgctgaagaagtttccagtcttttatacgaactcttccccaacctgacacagcttcaccatttcaacattcccatgctgtgtgtcatcctgtcatgtgaattatctttgttgagagacaagggtgttaggggctgacacgataatggctggtaatgtgtttagtgtgttacccttctaggtaagatgtttatgttttaacagtcgttttctacagaaaacaaatgaagccactttttttttttttttgtctcaactccctaggaaatacaatgcactgactttgacttgaatagtggttagaagcctactcaagtctctgacccagggacagagaactgtaggtttgattgaccaccacaccatttatactagctgtgggagcctgggcaactttgtttattcactcgttcactccacaaaggacttttgagcttgaactacatgcgagcctctgttctagccaccggagatacagattcacaaaacaaagtccctgcccttacagatcttacactctacggggaagatggacaactaaaaaaaaaaaaaatcattaaaacattgaactcattttgttttcattcctgcagaggttgaatgtgaataataatagtatttccttcctactgatgttgtaggaaacaaataagaatccaatgcattacattaggtacatattcaattacatttggtatatgtacagttcttagcagcaacagcagttactattcagtgactttcacccccggacaggaagaatgcctatccttaaagagacttttgaggacttgaggcagctgttgttttgtgtgtctagcaaactttcccatacatcgtgtcacttctctgcataatagcgtctatcctcatcttcatcatatgaccaagtccaatatcccatcttcttaacaaccatgttgggttgcagaggtgaacacacaactcaaacaaagccaacctgagtccttctggatctacatataaactgcaagtgaaggaaatgctctcttttgggaattctaagctggaggacttagaaatctgccacttgaagaaggcctatgtattagtaagggctctctagaggaacagaactaataggacaaatttataggtaaaagggagtttattaaggagaattgactcacacaatcacaaggtaaagtcccacgataggccatctgcaagttgaggagcgaagaagccagtggtggatcagtctgagtcccaaaacctcaaaagtagggaagccgatagtgcagccttctgtttgtggtcacaggcccaagagcccctggcaaaccactggtgtaagtccaggagtccaaaagctgaagaacttggagtctggtgtttgagggcaggaagcatccagctcaggagaaagatgaagcctggaagactcagcaagtctgctcttccatcttctcctgcctgctttattctagcagtgctggcagctgattagatggtgcccaccctgattgagggtgggtctgcctctcccagtccactgactcaaatgttaatctcctttggcaacaccctcacagacacacccaggaacaatactttgtgtcctttaatccaattaagttgatactcactattaactgtcacagcctctctgcaaaaggaaatgagctcaacccacaaagaaaagtagaagccaataagcagaattgttattaatagtgttttaattccatatcaagcataaacttaattctcttaataactcctgagataaatacgatgaagaaactgaggcacagaaagcttcagtaactgtccaaggtcatagagctaatgagccacaggatcagtagctgaactaggcattctgactgcagaatctttacatttgacccatatctcgctcttctctggctgcttagagtccaagggtaataatagctcaggtcctggatccctcagccttttctttggttttatgagtaataacaaaatcctccccatgcatatgagattatctgcattgaaacttgtatctagtttaaactgaagagtttcaagtgacaaaaataggtactccttgttgggaagaaatcccctaggtcaattctagtttgcccctcatcacactactccatcactctctatttgacaatccccaccttaatataattttatttctataagtaggttttttaaaaaaaatagagccactacttagagatgagtgtgtgggtaattgaaaccaacttggaattaccttccgagttgattttgattttgaccctcatggtaccgtgaccgtggactgttgccaagctcctcacatagaaactaccctgaagggttttataatatctatcgttactaacaattaatgtatttatggaacattgcttacaattgtattaatataaaatactatgtatgaattgttacctatatgattaactcatcagcttgattcacatgcagaatttcattttaaacttaagaactcacattcctttatgagaatctcctgggaagcttccatcttcatgcttgaattgtccaagaacctcagtctaaaagagttcctatgtttctaaatgagaggcagagaaaatactagcactttcttctttttctttttagatgaaattcactctgttgtccaggctggagtgcagtggtgatctcagctcactgcaacctccgcctcctgggttcaagtgattcttctgcctcagcctcccgggtggctgtcactacaggcacgtgccaccacacccagctaatttttgtatttttagtagagacggggtttcactgtattggctaggctggtctcaaagtcctgacctcgtgatctgcccacctcggcctcccaaagtgctgggactgcaggcattagccaccgctaccagccaatactcgcactttctgactactgtggtctgctgtttctcttcatcctactagtactgccactggaaactagctctgcatactttgatgagtctctgtcccccttggaatgatagcttactggtttgtatcactatgcctgctgaaacggtttttccacgtgtaagttcccaaggttattgttccttttaatttattgtgtatagttcagccttgttcccaaggcactgacatcattgaaaagtggctggttacaaagaagcttcaactccatactagagcagaatcagacattccagatcatctatgagacttggtatcctttactgcctagagaccccaataaaggaactccatatccttgaagctatacagtaaatagagggctttgcccctgctctgcagttccagcagctgtgaaggacagataccattgcatgagctatggatcacctacaggaggaaggaaactcattccagtaaccaggggaagagttgtggtgaatcatagactgttactgagggagagaattgtgtataaaccctctgagtaagttaagaaggagactgtatttcttagatggcaaagagttatggaagaatgttacctgcaaagattcaccagtccctcagttgccaggtgcagaatcagatgtgaatgaatcaatgccacaactaaaaaaaacctgaaaggcgtttcttgccatgataaacttcaggctagaaaaatggaagcacctgtgtgcacaggtggtattttcaagataaagaagtgaattgcagctaagtgacttgaatatttacaaaagatgcaaagtgaccttggtatatcagaataggagtctaccaaggtttgcagtgatttcaaaaggcctatgcacacagcatttgtaagacgtacaaaaatcactcaagacctgggctttctgtacataaaaaagaaaaaaaaccgctcagatacaatgcaaaatcagtttcttagggtgacagtaatgcgaagattgcattcacatttgcacatgaatataatatgggaattcactggagacagtatctgtgatctcagctatctatatatgccaacataaacagtgtaggaaaatgcagtatgttccagaaagctcagaaatatatatcacaagcatattttgtgttatctgaagccatttttaacacttgataaagcttattttatttgaacatataatgctttttataagaatcagatcaaatagaaggacaagatgaattgcattctagggtttttaaagacatactgatttatttaagaaaatattaagcaactactaaattctactcagtatgccaaatactggggattaacatatgaaaaaacaatcactcttgtctctaaacaattcaaaattaaatgggggagattcacgtaagttgatcattataatggaaagtcatatggtcaaaagaataaaggaataagtaaaatcattgttgaaatatattgtgaatggcatggccagcctgaggagttgcaaacaaaatttgcaaaattggcacagaggcaacatattgtcatgatggaaacagctcgctatgcaactgatgaacgtcacatttagtaaaaaagctgaataatgactacatttttgtcctgtgttgctgacagtagaatattaaatttgcaagaagtaattccattgataaatgttgattaaacaacattgtgtataagattctgtcctcagcacagcctagcacattagaatgtaatttttaagaaggaagaagtaactgtcaatgtgaaagtcacagataatttaggaaaaagaaatcataacaactcaaaatgtctaatgttatataaaatgatatatttaaaatgtattctaggaaatattgacatcaataggttgagagaaaaaacgcaatgaacaggagccattcctgagtatgcagggaagagaagatctctttttcatgcttaatcatttatttgtatttgtaatataccttgttctcagtgtttttgaaaaaatttacaagaatacatttactgaaataaaaactagaaataaaaacagaaaatcagacaaaggaaatacaaagacaacaatgacaaacataagtcaacccatgtgccgtatttacactctgaatttaagtcttcttttctcccatgaaaaagaagacatgatttgatttgttatctctttcccatgatcagatatcagaggaacactgaattctacaatttctttggaccatcagcattagcatctgttggaagtgaaaacaattagaatctgcatttaaacaagatcccagacgatatatatgcacattagtttgagaagcagtgttctaaaagtcatccttcagccgggatttcatacaggaaatcctgagtgatataatcgtccatgtaatgaatgacataaacaatacatgtttcctatagaaatttttgaaatgacaaaggatatgataaaactaaacccagggcagagagttcttggacatgaccttgcaaatgcaattcataaaagaaaaatttggtacactggaccccatcaacatttaaaacttttgctctgagaaaaaacttaagaggatgaaaaggcaagatacagactaggagaaaatattttcaaactatacatgcaagaaatgacttgtgtcccaaatatataaaaactcttatttattttttattttttgagacagagtttttctcttgttgcccaggctggagtgcaatggtgcaatctcagctcactgcaacctctgcctcccgggttcaagcaattctcctgcctcagcctcctgaagtagctgggattacaggcggccaccaccactcccagctaattttttttgtatttttagtagagacggggcttcaccatgttggccaggctggtcttgaactcctgacctcaggtgatccagctgcctcaacctccagacgtgctgggattacaggtgtgagccaccatgcctggcctagaaagaactcttaacactcaacagcaaaacaaacaaacaattgaattcagaaatgaatggaatacactgttatgggctgaattttgtcccccgtaccccaattcatatgttgaagccctaacccccagtatctcagaatgtgactgtatttggaaatgggaactttaaaaaggtgattaagttaaaataagaccgttaaggtggcttaatccaatctgatgaagtccttataagaaaagaaaattaggccgggcaaggtggctgacgcctgtatccagcactttgggaggccgaggcaggcagatcaccaggtcaagagatagagaccatcctggccaacatggtgaaaccccgtttctactaaaacttcaaaaattagctaggcgtgatggggcgtgcctgtaatcccagctacttgggaggctgaggcaggagaatcgcttgaacctgggaggcagaggttgcagtgagccaagagatcgggccactgcattccagcctggcaacagagtctctgtcttgaaaagaaaaagaaaaagaaaagaagagaagagaaaggagagaaaggaaaggaaaagaaaaaaaaaaaagaaaattagggcacaggagaggccccacaggatacagcagagaccctggggattcacagaggaaagaccatgtgagacacagcacggagatggccaactgcaagccaaggaaaggtgcctcagaagaaaccaaaccttgttactctgaccaacaccaacacctctgttttggtcaaccaaaccaacaccttaatcttggactcctggattccagaactgtgagaaaagtatttctgttgtttaagccatgcaggctgtggtgggttatggcagtcctagcaaactaatagaaacatgaacagacttttcaccaaaaagagatatagacagcaaataaactcgaaaagatgttccactgagaaagtgtgagttaaaaccacaataccatatcaccacccgcctattagaacagctgaaataaaaaccaatgcttacaccaaatgctggtgaggatgtggataaactgtctctctcccacactgctggagggaatgtcaaaatggtacagccactatggaaattaatttggcagtttcttatcaaagtaaacatgcacttacgtacaacccagcactcacactcctgggcatctatcccagaaaaatgaaaagttacgttcatgcaagaacttgtacacagatgttcacagcagctttattcataatagccaaaaagtggaaacaacataaatgtccttcagcaagtgaatggttaaatatagtctggtgtattcatacaatgtaatagtaccactcagcaaaaaccaaacaaacagaaaaaggaactattgatacacacaactgggatgaactcaaagccatctcaaaatacatactgtgtaatttcatttatataactttctcaaaaagaaaacattataaagatggaaattagatttttgatttccatggacagagacaagggaggggagctggtgtttctataaagggatagcctgaggtagtttctttgtagtgactgaacagttctgtcttggtttatggtggtggttgcacaaatctataaatggaatcaaattgaatagaactacacacacacacatacacacaaatgaacttacgtaaaaactggtgaaaacgaataagatcgattgtccagtgagcagtattgtaccaatgtcaatttcctgcttttgattttgtactacagtgatacaagatgtcaccagatggaacctgggtaaaatgtattatgggattctatgtactattttagcagcttcccaggagtctataatgatttcaaaagaatttaaaacataaaagatcattataaacccagatgacaacggaatcttgcaaccaagttatcatgacacacctataattcacttatcccattatcgccagaagtagcatcagcaacaaaagttggaacaaaggggaaacaacaaaaattggtactagaaaacctagtgggggagcttgcaaaaatttagttcagatccagacattgatgatagaaatgaaaagactgacttcagatctaagttgtgatggttaatattgactgtcaacttgattggattgaaggatgcaaagtattgttcctgggtgtgtctgtgagggtgttgccaaaggagattaacacttgagtcagtggactgggagaggcagacccaccctcaacctgggtgggcaccctttaatcagccgccagggaggctaggataaagcaggcagaagaacatggaaaaactagactagcttagtcttccggcctccttctttctcccgtgatggatgcttcctgccctcgaacatcagactccaagttcttcagcttttggactcttggagcttcaactacagattgaaagctgcaatgtcggcttccctgcttttgaggttttgggatttggactggcatccttgctcttcagcttgcagacagcctattgtggaacttcaccttgtgtgagtcaattctccttcataaactcctctttatatgtacatctaccttattagttctgtccctctagagaacactaacatataagtgttgaaaactatattcagtatccaaaggtaagtgatacattcaagagaagaccagggaccaggcacggaggctcgcgcctgtagtcccagcactttgggggttgaggcaggcagatcacctgaggtcgggagtttgagaccagcctgaccaacatggaaaaatcccatctctactaaaaatacaaaaaaattagctgggcttggtggcgggcacctgtaatcccagctacttgggaggctgaggcaggaaaatcgcttgaacccaggaggcagaggttgcagtgagccgagattgcaccattgcaccattgcactccagcctgggcaacaggggtgaaactctgtctcaaaaaaaaaaaaaaaaaaaaaaaaagagagagacagaagaccagggtgagtccagctgaaatagcatcagaggcatcctccctggcactgaatggctctattctgtggtggtgactctactctgtgggcatcttgaaggcactgtgtggcctaatgacctgacaaattaaagaagggaataggaaatattcgttgatatatctgtcaattcaatctttaaaaaatacttaccagacaaaaactactatactgtgaagaagaaagtaagatgataagcaggctatactcagcgatgctattccaaaatgatatgatataatggaagaaagacataccacatttgacatttacaatgatggtgcagtcttttacacattgctggtaggaatgtaatgcagtgcaaacactctggaaaataatttggcatttctaaaaatttaacatgcccctactatacaattccacaaccataatgtgtgggtgattccattaaatataatagagaaaagatcacattaaagaaaaatgaactgggagtggtggctcacacctgtaatctcagcactttgggaggctaaggagggtggatcacctgaggtcaggagttcaaaaccagcctggtcaacattggcgaaaccctttctctactaaaaatacaaaaattagctgggcgtgggggcgggcgcctgtaatctcagctactcgggaggctgaggcaggagaatctcttgaacctgggaggtggaggttgcagtgacctgagatcatgccactgcactccagcctgggtggcaaggagaaattcggtctcaaaaaaaataaaaataaaaaaaaaataaggaaaatgagactaagataaagtttaaaactgtgcaaaatgtgttgtgttacatttaatgctgtccccaaatagctcgggctattagaattgcctctattgaggttaacttgaggcacagcatgaataaatgctccagaaaataatttcacttctaagcaaagcactcgtacatcttatttgtcagtgtggattcaggctcacctaagtgtgtgttctcatagacatggcacatgcgcctacagtgtgagagcgttgtttctagaattacttcctttataagtacatccatgttcctatttcagagaatttgaaactaccttggtagggtgatcatagcatgattagagatgaaacaccgtaatacatcctttaattctatttcacaacattttcagatttgatcaacaaggctaattaactcacgattttattcacatttcagtttaaagcttgagaaattatgaaatcctaatttcagtccttgtcctcttgactttttcagaaactgcattttccatgtggggctagtggggctctgtttgacagcatgaagcttcttcttaataaatctcctccttagaccgaatacactgaatttatccactctaaactcacagtggggaggtgctggctctgggcgctctccctaagctcttctctgatggctgtttgcttagtattctattgtacagagtccctgtttattggaaactggtttctggacctactcatttgaatgccaccaccagcctggcagatttcaccaggtggaaatgaatggattttccgtaatgtaggacctcatcacagcatgccagttcaggaattccattgtttaaccaatacctaaagtcataaccttttggaaggtaaatatttaatcttctagctctctattacaaattatcaacgcccccccgaaccccagcaaactccctctgtctttttaaaaatagatgaacgtatattggtagaactggacagatatcaaataatgaatgagcttttcacttttgtagtttaaacatctgaaaaagaccagatcatgtaatggggaacttcaatgttccagactattttctttggctgagttttggaaagagtgcagtgtaggaaaagttttgaggtaagttttagatgacatgactagtgacaagctctatttggttaagtcaccccagttatgtgtgtaatgtttcctatttctgaggaatcattaaagaaggcgtaattctatctaagttagaatatttgcttagttctaaccaccttgaggttaaaatgtgctggtttgtaccatctagacctccctgctgccttccctcctgacctcaaccccttctcttttgtgttgtatttctctccttccctccttctctcatctcttcctctctttggtttaaaaagaacagtttcatatttcacacagcattttactttgtctttcatgtataggacagaaaaatcaggtataggctatagttgaaaatacattttctgcacctgcagtgtttgcaataataagaaaaaaaacccttgagatgaaattgacataacataaaatttaccattttaatgtgataagtccacagcatctagtgcatttataatgttgtgtaagcaccacttttatcttgtccttaaccattttcattttaaaataaacccccataccaatcaagcaatttttcccaattccccctcccctcagccactggcaaccaataattggctttttatttctctggatttacttattttgaatatttcatataaatggcatcatacaatatatgacctttttgtttggcttctttcactaacataatgtttttgagattccttcatattgtagtaggtattagtactacattccttttaaagactgaagaatactccattgtttatatataccaacaattatttattcagtcagtctttccggtggcctctagacaggttagaatatacccacaatttaatttttaaataaggtttgctcttttcgctccataaccagggatcagagttccatgctggaaacacgagctgctatcttcaaggctgccgccgagaggggagtacgtggggcaaggacgaggcaaaaaatgccacaaaactctcctaccattactacattaacttttttttcctttgatttgttgtttagtaagttgctgtaaaacttttggtttgttcttctggttcactttgagctttgtccattcactctctcttttgagtttttatcgttaagaaatacttaaattttgaagatctttggatactttttaaacaaatgaaatctcttcttgcctctcactgatgatattagaaatatctattttaaagtcctggcatgcttaatttcctgtttcttcaaccatttgctggatttggtacctccctttcatgggccgggtgcttggctctgtttaactgtatgcgaatgatttcctgtgagtctatttatgacaatattgtcgttacccaccacttcccttgagcatttgccagagaggaaaggctactaccaggctgggcaccctgcagcgtgtccttagcacctggggtgatgagtctcaagagaggtgagccagtgtgcttcccgagagtgtgggctcccttccccctcaggtgtcccacgtgtcccagagttactcccattgcgctttatttagaccaagtgcctgcgcttctgctctatctagcaagcagacattggtgttgggtaggatagtcaacctgtctcattgcccagaaaaccagaattccacccagcgtgtcccatctactccagagtccctcctgctcctaatacttactaatgagtaattacggtgagggagcacctggagtgcttctatcttttggcagctgctctctcccgctcctctttttttgcctatggttttccttgtttatcctctattcatcttccaaagagttttcaggtctccaccatcagcgcattgtattttctcttagtatgagtctgaactcattgtgaatatgatttctgccatttctgggaacttgagaacagtggaggaataggtcataaaatattcttaatctaccttttgaactctttctaccactctctttcctacttggccatatttcctgacagtgccaatagcatttccttcctccactctctttgcagagattgtttttctctgtcttcccctcaaatttgtcgaaatagtattcttctctacttcttcatctgggctgggcaatgtttcaacacactttttttttccttgatatttcttctctttgagcagaacgataaatgtggcataggttaacaaagagttcacaagaatgctgtcagagagaagacagaaaagtagagacactggtgtgttttacaaatgaggctgttttctaacatacttaagcattcttcccataattaacaatggcagatcttgcctggctgcagcaacattgaaatttacgttggtttttaaaatgttttatgttgaaactcccaagactcccatatctcccacctgagtgaatactaatattttctggctatcgtatatttcacttccaacctagcgtgtaatgcacttcatacttgtacattcttgtgtttatgtaaatatcaatgtagatttctggaaacaacatccatgtcaagtgtggctttaatcaggcacattcttttaagaagaaactttggaaacacaatcaaagcacaatcaacttgaagactttgataaggctaaattatgtcttagctagttatttgctatcatttgatgttttagagtggactgatactgcttatggcttttttcattcagaaatgcaaaacagttttttatttcaaatgaacaagagtacttcagaattaagacttcagataacataggatgacctaaaagccaaaccaaattctatcacctttcttaagtatggccttttcccagtgccctagagtgaagaataaaccatcagataagtcagattttgtaattttgctcaatgtaatagactagtttttaccttctagtttgttaaccaaccataagcattctttctctactaatcagtgagttgtctgagaaaagtctgaggcaatttgatttcaaaatgtattgtcttctttttatccccttgatgattatatatccccctagagagaaccagttactaagttcattccaacctactgaaaatgtatttaacttgagtctgagttttcttatttctaaaacagctgtaccaattcatgaagaagacataaaaattctaaatgtttatgcacctaaacaccttgctttaaaaaaatgacgtgaaacttttctaaaagggcaaacagaaaaatccactattataggtggggactttaacattcttctctcagtaattgaaggatgtgaatacacaaacgtatcaatgtgagtatagaagattgaaataagtttaaccaaattcacttaattgacatttgtagaagtctaccctaaaatcagaatatacgttcttcttactatactgtggaatatttcgtgagatagactatatgctgagttataaagcaagtaccaatacgttcaagaggattgatgtcattgatatgctctctgacaacaatggaagtaaattagaaactaataaagaaggctgggcatggtggcaaacacctgtagtcccactgctttgggaggccaaggcaggacctgggcaacataatgaggtcctcattgttacacaacaaaacaaaatagccagcattcactcatgcctttaatcttagctactcaggaagcagagaaggaaggactgcttgaggcctgaggttcaagcctgcagtaagaaaaaaaaaaaaaaaagaaaaggaaacaaaaaaagataaataaaggaataatacctggaaaaatcatttgaaaattaaataagtaattttatgtaatccatgagtcgaaaaggaaaagttacaagagaaatcagaaaatattttgaatgaatgataatgatagcacaatgtattcttgagattcttaaattagtatatacacagaaaactagctttaactattgtataagaaaaggagaaagacttaaaatcagttctctatactcttactttgaagaaccagaaagaaaagagcatattaagcctaaaacaagcagaaggaagaatataataaagataacaggagaagttgaaacagaagactgatttaaaaaaaaaaacaacagaaaaattagcaaacccaagtttgattctttgaaaagattaattaaattgatgactccctgacaagactggtcaagtagaaaagaatacctaaatacaaacgtaagaaaacagacaccactacaaatcctacagacataaaatgtatcctacaggcataaaatcctacaggcataaagaatgaaacataagaataatgaaaaaataagctattaaatttgacaacttagatagaatggtcaacttttttgtgaaaacaacttactataactaacacaataattaaaagcaaatctaatagtaatttatcttttacaaattgtgtaattaaatacttacctatgaagaaaaccaaaatcctagatagctaggattttgaatatcaattcaacatagatgatttcagaaactagaggaggactgcttgctttccaatttatttcgtaagtatcaccctggaaacaaaaccaggcaggggcattacaagaaaaaattattacagaccaatatctttcataaacatagacataaaatttttaccaaaatattagcaaataaaatttggcaatgtatagaaagattgatatatcttgggcaattacaacttatccaaggcatataaaggtgtaacatcaaaaaatcaatccatatatctatatatgtggagataatgtatcgtactagatactatatcataagaacattttatattacatataccacaaactaaaaattgagtccaatgatccaatgaacagagttaagttcttatattgctttttgcaaacaaaactggttctaagcattaggtatattcaatgatgtctagccatctagaatattagatgttaaaaaaaatattcaacatcacaacattgcttgtcacaaaatgtatgacaatatccaccagcaataggttaatgttaagaggtgattttataaaagactcctaggtttgataaataaaagactcctaggtttgataaataaattcagtaaagtctcaggtttcaaaactaacgccattagggcattgacaagatagatatctagtgtaatatgtcagtgtttttctgacagatgcaacatggtagaaatgtcattgaaaatgttgatttgcctttgtttatcattttcaaatgtgtttgtatatacatatacacagttatttgtataacagaaaaatgccacatatggtcaaacagcctaagttagagaagtttccatttgccagtggaatttgactttcatcaatagtaaattgttttgtatttaaaacgtttctctttgtagaattaatttaaaagtcttcacggggatactagcaatagtagcacagatgaattctaccagacattcaaagaagaattggcaccaatcctactgaaactatttcaaaagatcaagaaggagggaatcctccctaactcattctatgaagccagtatcaccctgataccaaagccagaaaaggatataacaacaacaaaaaaagaaagaaaactacagaccaacatccttgatgaacacagaaacaaaaatcttcaataaaatactagcaaactgagtccaagagcacatcaaaaagaaaattcaccatgataaagtggttttcatcccagggatgcaagaatggttcagcattcacaagtcaataaatgtgattcactacataaacagaaaaaaacccgaaaacattatgatcatctcaacagatacaggaaaagaatttgataaaatccatcatcaccttatgataaaaaccctcaacaaattaaccataggaggaacatatgtcaaaataataaaagccatatatgacaaacacacagttaacattatactgaatgggaaaaagttaaaaagcatttcccctaagaatcggaataagacaaagatttccgctttcactacttttattcaacatagtactggaagtcctagccagagcaattgagcaagagaaaaaaaataaagggcaaccaaatcggaaaagaaaaaatcaaactatctctgtttgctgatgatagaatcttatatctagaaaatcctaaagactcctccaaaagactcctaggtttgataaataaattcagtaaagtctcaggttacaaaacaagtttacacaaatcggtagcaccactatacaccaataacaaccaacctgagaatcaaatcaagaagttgatgtcagttacaatagctgcaaaaataaaaaataaaaacctaggaatatacataaccaggaaggtgaaagatctctacaaaaaaaaaaaaaaacaaaaaaaaactgtgtaacactgaagaaagaagtcatacatgacacaaacaaatggaaaaacatcccatgcttatgaactagaagaatcaatactgtgaaaatgaccatactgctccaagaaacctacagatttaatgcagtttctatcaaaataccaatgtcatttttcacagaattagaaaaaattctaaagttcatatggaaaaaaaggagcccaaataaccaagcaatcctaagcaaaaataataaatctggaggcatcacattacccaacttcaaattataccacaacattatagtaaccaaaatagcatggtgctgctataaaagtagacacatagatcaatggaacacaatagagaatccagaaataaagccaaatacataaaaccaactgatctttgacaaagcagacaaaaacagacactgggaaaatgacgccctattcaataaatagtgctgggaaatttggatagccacacatggaagaataaaactgaatccctgtatttcaccaaatgcaaaaattaactcaaaatggattaaagacttaagtctaggtcctgaaaccacaaacattctagaataaaatttaagaaaaactcttctggacattggcctaggcaaataatttatgactaagacccccaaagcaaatacaaaaaaccaaaaataaataaatgggacctaattaaactaaaaagctttggacagcaaaagaaataatcaacaaagaaatagacacctacagaatgggagataatattcacaaactatacatctgacaaaggactaatatccaagcaagatattcaaacaaatcagcaagaaaaaaaaccaataatcccattaaaaagtaggaaaatgacattagcagacatttctcaaaagaagatatacaaatagctagcggatatagggaaaaatgctcatcactaatcatcagggaaatgcaaattaaaaccacaatgagataccacctccctctaggcagggtggccatgattaaaagtcaaaaacagtagatgttggcacagatggattggaaaaaaaacacttactcactgctagtgggaatgtaaattagtacaacctctatggaaaacagtatggggatttctcaaagaactaaaagtagatctaccattcaatccagcaatcccactactgaatacctaaccaaaggaaaataagtcattatgtcaaaaggtcacttgcatgcgtatatttatcacagcacaattcacagtcataaaaatatggaatcaacctaaatgcccatccaactgatgagtggataaagaaaattctgtgtatgtatatatattgtataatatataatgtatatataaagtatatatgtgagtgtatatgtatgtatatatacacataaacacacacacattttctctatccactcatcagttgatggacatttagattgatatatatcatatatatggctcagtatgtgcacacacacacacacacacacacacacaccgtagaatactactcagccacaaaaaaggtgaaataatgtcttttgcagcaacttgaatggaactggaggtcagtatcctaagtgaagcagctcaggagcagaaaaccaaataccacatgttctacttacaactgggagccaagctatggctatgcaaagacatacacagtggtataatggacgttgcagactcagaagagggggtgtaagggggatgagggatgcaaaattatctattgggtacaaggtacactactcaggtgatgggtacactggaagccccgactttaccactatacaattcatccatgtaaccaaaaaccactcgtacctttaaagctattgaaataaaaaaatgtaagaaatcaatccatgtcatccactacattaaccaaatgaagaaaatcaaatggtcatgtcaatcgatggagaaatagcatttggcaaagctcaacatccatttatgataaaagttctcagcaaattaggaatagaagggaactcctccaatttgataaacagcacacaagagaaacatgtggctaatattatatttaatggtgaaataccaaatgcgtttcccctatgatcggtagcagagtgaggatgttcacatttactacttccattaaactttaggtttgaggtcctactcagtgcaataacataagaaataaaagatacaaacattggaaatggggatgtaagactgtctttattttcagataacatacttgtatatatagtaaatccaaaggaatctatgaaaaatacaagaacaattaaataaactcatgtttgtaagatacatggtcagtatacaaaaatccattgttggtctgtaaaacaacaatgaacaaatggtaactgaattttaaaaatactattcacaataaaactgtagtcatacatttaatgaaaggtacacaagatctctgtaaactacaagacattgataaaaatatgacctaaataaatggaggtatttgtcatgttcatagtttggaaggcttactgttgttcaaatatcacttattcccctcccccaaactgctttttgaagataatacaaaattctagagtaaattagctataaactgggagactgatgagtcacctacaattgaagtataagaaaatatggtatctattttggctacatctgatgttgttttaattttttttttaatttctgggttttttttgtttatttctttttcttcctggttcttgttccaaatggttgaatttgtcagacaaggcatttcagataattatacaattgttgttctttacaacaatatgacacacttcaaggtagaagttttcagaatattcagtcattcatttattcaacaaattattatggagaacctactatgttttagccactgttctctgtgcacttggatatatataccaggaaacttgaggccacaccaagcctgtagaagaactaaagtcagtaagtcagagactaggatgtatggtgctttcagagttcccacaacgagaaacgatataagatatatcaaatgtaattaacaaagtatttattttaaaaaatgcatccatagtatttactaggtacaaacctagaggtagaaattgacagcaatccaatattaaggaggagtcaattgtttatatacaaactttaatgttttaaaacatctggcttccaatttactaaacaggttttggcgaacatatggtacaactgaaacacacacgtggttggagggagtgccaaatggcagaaccattttgcaaatctgtttggagtttcttccaaagttacatgtacaaacaccatatgaacctgctcttaggcatttacccaagggagatgaaaaagtccattaaaaaaaaaaacttgttcacaaatgtgcttagcagctttatccataataaccccaaacagtaaacaatccaaagacccattcacaggtgaaagaataaataaattatgctatattcatacaatagaatactatctcacaattaagaggaatagctgataaatgaaaacacatggatgaaactcaaagacattatatgcaatgaaagagtcagacacaaagaatatacactttatgaatccatttatagcatacctagaaaagataaatctactcaatagtggcaacagagaccagtggttgccttcaagggatagggaaatattatagatcttgtgatagtagtttcatgggtctatatatttttcaaaactcatcaaactgtacactataaatgtggtacattttattgtatgtaaattatgccttaataaaattgacttaaaaagaaaaatctaaagtaggaaaaaagaaaactcaccatataagattttctatttttgaccaatgtcattaaagcaaatcaaagccctggaatatccactatgggtaaaatacttatacctcccaagaaagacaagtacacattttaagtggtaagttggaaatgatcaaacattaaaatgcatgacacttgaatgggctgatattccaggaataatcgaggagctaaagggaagagaagccacatctggcacgaattcctccatggccatgagttactctacttctggccccgaagtggaggatgttggtccctctgaagcctcatgcacattcgggaagggagcaaatatctacaggacacaaagggacccgagacacaaaaccctctgtgtggccatgtgcagaggaagggagacagggcctgatttgtgtctccatctgctctgggctggcaagagccttcagtgagagaagtgctcagcagcccaaatgtgcttatgatttgtaaataaaataaagtcaaacaactgcaagcaaacagtgtgtgtggtgttcttctgcccaaattcaaccgtcgagtcagtgaaggctgggtgtgttaagaaagcaaatgtctctggggtcagtgtagcattctggtttagaaatcgaggatcttggccttcactttgaaaacaaaactgttcaatgtgcaaaaccggacttaacataaataatgcggcagctattatagagaggccttttcgatgctggtggtctccagacactcacagtctggcatttcatgttacatttcaaaaccacgaatcattataagtcacataaatctgtcacatcacttgaatttgtacatcaccaaatccctgtctaatttttcaaagactatcccctgcccaaatgaagttgaggctctcagatccgatggggtttactgcgttggcatatcacccatgtcacagcttgtctttctattatgtgaatgaaaattttccaagaatgttgaacagagttcagtgttactaatagttgatacaatatttaggcaaccaagttatattagacattgctgtaaaactcctttctcacaaatccacctaaaggaaggcatggctgttccatattgtttgccactgtcatcttagttacaatttcagagccggcacagcacaatccagcactcaacttgtgtttctgggcttctcacccatgcttctccctggaaactcagcttctctttacttccctcgggatttataaacatctcctcgagtttgttctgtccgatttacccactcttgtcactcctcactccaattacaagtcccccttccccagattgtattattgcctattgcatttaaataatttaattatattattaaaattattttattaaagcatcacacactaatgacatcaatattataaggaaacatttgatttttaaggggaagggaggaattttccatattccacgttcacgttttaatctcttaacatgatccccatcaccatgcatacgattgtttcattagctgcaccaaaagtgaaaacctttttttaagaacttatatttgcctgtaattccagcactttgggaggccgaggcgggtggatcatgaggtcaggtgttcaagaccagcctggccaagatggtgaaaccctgtctctactataaatacaaaaactagctgggcgtggtggcgggcgcctgtaatcccagctactcgggaggttgaggcagggaattgcttgaacctgagaggcggagattgcagagagccaagattgcgccactgcactctagcctgggtgacagagcaagactctgtctcaaaaaaaaaaaaaaaaaaaaagagctgatattcaacccttcctttcttcctgtcatcttttcatcaataaggcttcagatcccagaaaatccactccgactatgttatggtggtgtctctcccatgttttcatacatgagctaactgatcagttgccacctggagcttgcctttccttttccctcttctttccagccccagatctattgctaccaggcacttatatcccccacggtgttccactatcctctgcctatcatctgctggatgttactattacatggtagtgcctaccaccctaccgtgcacaagcatctcctgccaagcaccactgtcccccttgtcaaagtactagtgctgcctaaggtgtagaaagaagtggaggaggctgcacgctgtggctcacgcctgtaatcccagcactttgggaggccaaggtgggcggatcacgaggtcaggagattgaggccatcctggccaacatggtgaaaccccgtctctcctaaaatacaaaaaattagccggggttggtggcgtgcgcctgtagtcccagctactcgggaggctgaggcaggggaatcgcttgagatcacaccactgcactccagcctggcaacagagcaagactccgtcaaagaaaaaaaaaaagaaaaagaaagaaagaagtggagggaaggtctagccctcttttgagttaccctctgttggcagtgacctgatctgtgactctctgtgctccattttctcaagagattatactgaactggctcatcctcttttcatttattgttcccctattcaaaaaaagacttgaatacaggactgatggcatacctggtttggctgagtgacagacaaactgctaaactcagaatgaccctgctcctccaggccctgtcctgacttagtacctttaaaaaaaattaatgaaaggagcctattttcctgtttcttcttttcctttaaatgacctctaactcaacaagcttctcctgtcttcaggaaaactgacatctggttgacccacaggagcatgtcctgatacatatgagctctgggggttaaagcagcttagactaaaactgaggcagccactgtacctctctcatcaatgaaatttacagtcttttgtaaaactttccactcaaacatcttatgaaattagttgatataaaaatgagtgatgctgttttctgaatgcattcaaccatttttaagtcttgacttaaataaaaatcaagacttcttaagtcttgatttttattccagaatttggtccacatatttgataactttatcaggaatttttttttttcctaagagtgatgagaagttttttgaaatgatttaagcatgtggttaaacaatatcagatttatagctctctggctgccatgtgagaatccaattaagaggaaggttaacatgtatatagctgtccaggagagatgatggaagattggattccagtggaaacaatgaaagtggataaaggatctaagaaatttaagagatattttggagatgagacacagacttcattcactttaggtgtctttgtaagcttgggttgccataacaaaatactgtagactggatggcataagcaacagaaatttattgtctcaccattctggaggctgtaagtttgcgatcagggtgccagcagggttaggttctggtgagggctctcttcctggcttgcagatagcagcctgcttactttgccttcacatttcagagaaagaaggagagctgtctaatatctcttcttgtaagggcactgactccattattagaacccatcctgaggaactcatctgtacctaattacttctcaaaggccccctctctaaatactataacattgggaattagagcctcaacatatgaattttgggggacacagttttggccatagcagcatgtgtacacacacacaaacacacacacaaacacagagacagacagaatgtacacctggaatcacggtgacctaagtggccacaaaatcttcacccatgtctacttggggagaagttactctctaggtttcaaaatcaacctgggtgatctgtgatggtgatgtctgcagcttaagatttacacgtcattagcaagttaaattacttatcctcttcaatctcggttttcccatcagaagactgaaattattaaaatgtactctgtagaagctcagaagttcgagatagtacattctgagggcctgtctgagatcctgctatattttaagacagaaatggttgtcagattttaaagctgatgttctgcatgttttctagaaaacagagtcagagaataagaatttattagtgtttatccaacattctcttcaagtcagtagacatgagtcaccagaagtgtactctgcatttaaacattggtgttttctgtaactttaaaaatggtcaaaactatgtatgtagtcaggagttctatgcattgaggaccagctctgtgccaggtacaatgctgaggacttgggacctagcggtgagccaaaaaaaaaaatgtcctggtctcagcctccctggagctcgccgtctactatgaatatagattttgaataagtggctgtaagttagagggctgtgaaatgggaagtctgtggtggatgggagcaggtaacagggggagctaaaccagtcttggcgatcagtcaagccatctttgaggaaacaaccattgggttgagatttgaaggatgaacaagaatgatataggtgaaaatggggaaagaagcatatcaggcagagaacagtttggagacacaaaagaatatggctccttagagaaactaatagaaaaagtggtgcattcaagagtagagtgagcaggacacaatggtccaggatgaggccagggcaccagacagaggacagagcgtggagggtcttataaaccttattaagattgttggatagttgtgaggacaaaaaatagaaagctaatgaagaattgcaatgaaatatcacacagagattttctaccctctaatcaagaaatagtagtagcaagaactatgacagagtaaaggataccaaaaggcatcacaaagaatagtgaccaccacgaattttgagggattctgtctccttctttaagaaaatgccgagcagtaactctaagaggcagctaccaagagatattggtagaaagaaatggaaggtaattctgtccagacataaagacatttttaggcctacaaataaataagattaacacaacatcctatgacactaggtaaatggagtgaaaatatgtctattggttaaaaattattatgttgcaaataacagaaaacccaatactcacactagcttgagtaattaaattaattgtctcaaataattggaaatccagaaataaggcagcttccaaggtgagctaaagctggattccagatctatttctctgcatttctcttagctgtacccttctctgtgatggctacgttttctcctggtggcaacatggctagggtaccacacacaccacccaggagacgagagagtgcttcttccagtgggcctctattaaaagcagagaagcttatttcccagaaaccttgagcaatcttttcctcatatgattcaaattgggtcccataaccatttttgaaagaatctctgtgattgggagggtttccttgtgctgagcggctgagacccaagctcctgttccagttaatgtggggagcttgacgggacccccattggacaggtcaggctcacccccaccgatgggggacagtgatcacctcttgaaacacctgagatgtatgggggagagatcgaacatagataaatcaggatcttgttaggaaagagaaagcgaggaatggattctgggtagaaaccaacaatcgcttaccccagggatgggcaaactttttctgtaaagggacagatagtaaacattttaggctgttgcaactactccactctgtctttgtaatgggaaagcagttgtatagacaatacgtaaatgaatgtgcatggttatgttccaataaaactttatttacaaaaataggtcaaacgtggctcccaggccaaaagttattgacccttgattcattctatcctatattaatcagcacattttagctttctcctctagattattttccatctgaaattaatcttgttgtgaatttgcttgttaatttttaccttatttcattcatgtataaaattgctggggccagcgtgcaagtggcaatgagtggttacaagacagcaaggtaaagaatgtattttatcctggagtcctgcactctgtgggtagactcctatagggatggctgctttgtcatgctgtgacattttcagatggtgttctttgaaaagctttaaacttaatccaaataaagaatgcagacctcatttcatattcattgccttgcacactaacaaagctttagaaattttgctaaatgtggacttggacatgagtcatatgatttttactagtggagtcatagctaaattagaaagacaagacacaaagacattaagggacattaaaggtgacaaatatgatatgttactgggactgaggagccagcgcttgtatgctcttcctggtctttgtcgattttggaatagagattgggaaattaaattccaagaagggaaagagaagcatttactttcaagttgcaaggagcaaagaaagagtaaatactttcccactgagcacgatactgctcattttctggcaccatgtttgacaagaagtgatttctgactcacttgcaaaataatctcttcagatttcaactgaggagacttggatgaagtcaagagttgcaaaatggacgcttggaatcagaagagccactaaaaccagggaggaagaatggggtgggtgaaaaaggaaacataaggcagaaaactgcagatatcagaaaaatgttacatataaaagatgcaataataccgatcaatcatgagacatcatcactggctggaaggaaacagttgagatgtgtcacttcaaatttttgtgagtctgaaaggcaccaataaagaatgaaggaataagtcacatttgcaaaaatcaagaaattatatttgtatagtttctaaacccattgacaaatttagggttgacagaatattgtggagctgttacctttggccgggcaaccatgaggaggtgttatcgatccaaattgccttgactgaatctttgtttacccctcacactgtaaaggtttcttttttcttttttccttttaacaatataaagaattagaagttaggtatcagtcctcaaaaatctttctttgtgctcttgtccaattcaaatgtttacgaagttgcatcatgaatagaaagttgtagaaggcttgcagcctcctgtgaatacgcaaataaagataataattcagaaaaacattgaaaaacaacttgacaagaggatagaagtgtgaacatagcattaattgggctgggcacagtggctcatgcctgtaatcccagcactttgggaggccaagtcgggtggatcacttgaagttaggagttcgaaaccagcctggtcaacatggtgaaacccgtctctactaaaaatacaaaacaattagccgggcatggtgatgtgcacctgtaatcccagctacatgggaggctgaggcaggagaagtgcttgaacccaggaggcggaggttgcaatgagctgagatcgtgccactgcactccagcctgggcaacagagcaaaactccgtctctaaataaataaattaattaaataatacgggaaactagctggcctgcacagggaagactggagtggcctgctctatcagggggtgccatctctcagagtaaagtgggaatgaaatcaggaaagatctcaagagctgtgcattccgaggatttttgctttgcaagcactgcatcagttcagaaacccaagaaccaagtggtaaggagtgatggaacagggtgctctcatagaagaatggaaacatacacgtgacaacctgctggaagccagaaattagactagagcataaaaatactttataagctctagagtttggaagtggatttaccataacagagtgtacagatagtaagaccaagatccaccctttcacttaatctccatgtgggaattgagtctggatgggtttttcttgttcaaggatgtgaagtttgtaacatcgccaaaagtttaacaaggagttcattaaaactatactctagcacaatagaaaaggacagcattttgatggctaagaagaagcatctgaatattatctcatgcagaatccatgtgaaaattcagacaactatttagctttcgcaacttggttaaagacgccatactctgcgtgcctcatcagaaagactgaatagattgagataaaggcaacttgagtttgagcaataaaatttgtgaaagagaagaatatggaattgctttcaagacatagaaactgggatatagacaatctgcaagaaattaaagacgtagtagcagaattaaaatcagcctccaaggcagtaaagagcaataaaaaatgatgccatagaggccaaatttgcaaatttcccagcaagggcatggctccaatatatttctttagcttttagccactcaccccttggtccctcgtcttcagtcacaggttttcttttctttcctcaaatacatcaagcttttcccctccaggacctgtcattacttctggcttgaatgtattcctccgtcctgttcactaggctgggtttgaatcccagctaaggcaatttgcctgatgtcttggagactctgtctccttatctgtaaacccaattaacaccgtatcttcttcactctgctgtcatgagaattcaaggagaaattactcttttaatgactatcttgcagacgagactaacaataagctccaaaataccaaatatttgcctttttatttgtccttgtatactttgtacctaaaagacatagcaaatgttataaaagttaaagttgaagctatagtagaagaacatttctaactttttatgtgttcagtgagaacacttataatctaccctcttagtaaatttcaggtatacagtattgttaactatgggaagacatcttctgagccaaaagagttatccatacagaataatgctcagtgtgtttcactcagatttacaccaagacacaatctttataaaactctttaactatatagacaaagaaaatttcaacttctacataagaaaatagttttaaaagtaatccatcagtaggtaagtaaaagttaggctgattcatctaacttcttggccttaaatgctagaagacaacagggaacctcaaagcaattctgagaagaaaaggttgggatacaaggattttatagtgttaagctgtgtttttatatgtgaaggcaacagaaatacaccctcaaaagaaaggagtcagaagatactaggcatatactcttcctggaaaagagttccttgaagaagtgttgtaaccaactgtaaactcaaaatcagatgtttgaagctgggaaaaataatcataaaagtattggcagtgtgcactgaaacaagttaagctgaagagagatccaaataattgtaaacctgtcataaaactgaatgcaaatgaccattgtcctcacaaaagataaaattttttaatgaaaagtgatatgaataatctcaatctataaaaccatattacattaacaaagaccaagatgtgaatggagaaaagaaaatgtaaacatacgttaaatattttgcttatattagggtgactgaaaaaatacaagttccttaattctaataatttgcaaactgataggtgaaagaatatattttaaaagcctaaagataattcgtcagagaaaaggaaatttttttcttttttaaaaaaaagctttgtctgcttaagaaaaaagaaagtaaagagaaatctcaagatgcaaaaacagaaaggaaagaagacatagacaaaatatagtatttaccagagtaactagaaatgagataaactcaattattctagaggagatcctcaaatttgtatgttaataaagcaaagtccagttatcgtctatttacttaagacatacctaaaacaaattcatataaaaatgtaacaaggcaaatgcaagcaaaaagaaaaacatgaattgtaatattaatagaggactatgtagaatttaagaatgagagcatcaaatgagactgaggtgaaggacactatttgaatgtgtaaaaactagaagtttgtgtggtgacagagcaccaggaaacctttctgtgccaaaatcagtgcttaaaatgtacgtaaagctaaaactcttagaagtacaaggagaaatttgtagagacatatctatctcaaagtaattaaagaataaggaataatatggcaacatattaataaaagtaataaggtttattttaaaaatacattttgaactatgaattctacaaaaagtgagtgtaccccctcccagaaaataggggacttttaaaaaagtactatgtattaagcttcagatgaaatctccagcttcaaaacatagagataaaataaatataagaagcctttccctatttacctctaagaagtatttagaaaatatagtagaaaaagatcctaatcactaaagcaatcacaaatataaactgcctgggaataagcttcaaaataaaagtacagataaaaaaaaaaacaataaaatttcttgacaagtgtagagtgaaatggaaatccatggagaagcacatcctgttcagggggtagcaggacctaatagtgagaagacatttgttctcccctcagatcttgaatttcaatgcaatttcaagtaacattgaaatggaatttaggagaaacctagatttcctctttgggaaaaaagtgtgaaaatagccaagaaaactgtgaaatgaaagagtaatttaaaaagtataatgctattgtgaatgtctgaggaaactctaacaagtacttcctaagtgcaactcactatagaggcaaccaaagtgtgtagggaagagaagccatcttcaagaggaagagtctgggacagtggttctaagtgtggtcctaagaccagcagctgaggcatcaccttgacacttattagaaatgcaagttctcaggccccaccccagaaggtggggcccaggaatctgtgtttcaatgtactctttagaaaattccacagtgaagtttgagaaccactcatctatgtatagtatactcacttatccgaaccagaaacttggttgcacagttatggtaatgcaatggaaattaacagaatgaaaataattctagatggcagaatcaggaggatgaaagagtaaagggaatctcctgttagtgcagactaaaaagtctaggactgagaagttacttaacaggagtctcaggtctaggtccttactcttttataacacagccgggtgaccttggagttgttgcttcatgcttcacctcacttgtggcctgcattccttagatcccttgtctttgtgatgatgggtggaacgtggtgacatgggaagtccctttccatcctaaaatgcttctgaatttataataaaattgtacatccacaaaactcagctggaaatgtacaaaagatccagctttattttttctataatttaacttagtttctacctcaatactccatttcttctgctggcagagaaaaatagaacttcgtcatttctcagaagatccatttcagtataaatcacttaatcctggatttcagaccttcctctgtccttggtggcactgaagtcctgaggactgcacatagaagaacaatatgggactagagtggaggtgcatgtgccccacacctttcgtctgtcctaagcatggcattcactggaatgttctatgcttcctggacatccctccctgtgggtgtctgttgttctaatgatcccatccagcctccagagctacacagtccatgctattttctgtaacagcatcttctcctactggcaatgagacctctttaggtccataaccttttacccagctaactccagtgcctctcatttcacctggagaccctaggactctgagaggctgtttgagatactctctgcaccttctatcgcacaaaaccatgtgtcctctttctgctttatcatggttgttgaggttgcctgagaggttgcacttggctgtttagtgctgttcggtttctgatccacgtagatgtttacatggttgtggagcacagatacatgttttctaattcaaaggaattcccccacccccaagtttctagaagtaaaaaagattctttgaaattaaaaactcaccaggcaagttaaattctagacttgacacaactgaaaaaagaattattgaattagaagatcatactaagaaaataacctagaatgcagcatcaaagtcacttgaaaacaagaaaagttacaatgaaagaaaggtgactgaggggttttaacatgtttctagtaagagctattgtataaggaatagatgggacggccaagaaataacattcaatgaaacatcctttgttgatcaacaaattatagatttttgtaaatgttccatgcatgcttacaagaatgtatatcctgcagttgctacgtacaattctgtatattgtccattaggtcagggttgctgctcgtgtccctcaaatagtctattccttattaactcttaacctgcttgttctaggactgtgaaatagatgtgttttttctcccatatggctgcatagaaatccagaattatctccttctgatgaactgaaatatttatcgttatgaaccgtccctctgcactctaatagtactttttgtctaaaagaagaatctgatattaatacagccacaccaactttattttggtcagcgttttgcatgacatacctttgtccatctgtcttctttaaacctgcctgtgtccttctgattggatgggattcatttaaatatcatcaagcttttatctagtatgataatcgtttattttcaattggaacatttagtccagttacaattagtgattactgatgcatgtgaatttcaaactgccatcttaatctgtgttatttgtcttgttctatttattccattttaatccttgttttatcttggagacaagagttagtggttactctacggatgacatcacatatttataatttatcaaaatctaatattaactgatattttattcccttcctggacaaggcaaaaaccattgaaccctttaactattttaatcctttgacttatatcccattattgtcatgcattttgattctttccaaattttgaacttcaccaaaacattgttaatatttattgatagagtcaacatttatataaatttacccacgtacttacatatactttatcattaagaagttttccatattcacattcaaatatctacagatctgttatatgttcctttgggataaatggatgaggcagtgtggcttcaaaatctttaacgatgtttcacaatctctttggtttgcagtctagtcactgtagacatttcctgaatgaaaactcaaaagcctgcagcctggtgcgtgctatgacaatgggccaccaaagtagtaattagaatgactcagaaaatcaagtacgtaggaaggcttcatctggaattgtttgatttattttaacatgatcctaccctcaaccacttcatatatcctaattacagttctaaattaaaatgaggtttctgtggccctcctctgaaatgactggaaaaattctggctatggcaagtccaatggcaagaattacgtaagtgaaataaaccagtcggctcaaatatttgactgaaatgcaatattctcctgggattctaagtgagataacccgctcaacttcagcagagatggttaagcaagcagggttgctagtgagggtagaaggtggcctatctgggagggcaaagaagtatttctgaggtcgggcaaattatgtgagctaatgcctttcagcagttagtccttttggaatcccaggactgagatcccagggataaggttccattttgccagataaatgacagtaaatagaatgcttgggacaccatcttttccttgttacttggagagttctgtgaggttttctgggctctgtgtgtccgtgggtacagaacaggttacttccccacttccactctgatttctcataagtgacttccccactttcaagcttaaaatgggaaaaagtgttgggggcatgaagatcgcaagtgaattcttaggtcttgtccaatgtgatgttttcactacagagagaatcttctggccatccccagatctctggccatggtgaggagaagatcatggtactttttagtattgtgattttttcccccttcttctttcagtataggtcctatgacagtttaaatctgtctgcctggttctgatccaccaactcctgcagcctggctgctactaaaaactcacttctacagtaacacatgacttccacccatgacagcatgtggacgcagagaaaagtcttaaatgcaaaggtataagctgtactgttttctctgttttctttcatctctacactgcacagagacctagaagaatttaggtcttatccacaagtgaagacggcagtacaaaggcaagatatgcattgtgatttactgttaaaccaagtttaggccaaagctgcctccttacgtattttaagtttggcttaaacgttcctctggacatagagagctgtaacctaactggatatgtaaacagactgtaacctacacttgtgccagtcactgagttttggccagtcaaaggtggccaagtgttcaaactggattcaaataaggcaaacacagagctattaccaatctggctgtttctgtgccttacttccatttgctatacgtcactttcctttttctgttcataaatcttctctctaattttctataacccttgtttcttagggctacagagttagcaaataaaaaatgtaggacaccctcgtattgtgtgggacatacttatcctaaacaaatgattcactgtttatttaaaactttaaatttagctgtgcaccctctatgttatctggtaatagctttttttggcgtcttgtggcactgccttctcttgctcactatctgttgtgtgtcatacgttttgctctacaagcccgtaaactcttgggaattgcctctagtccctaactgcacttgattcagagctgaatttgtattatgactgaattagcataagatgaatttggtttaacatggattccttcgtatcaccctagataacaggtttaaagtcgtcgagagtattagaggacctagcccataggatcgaaagatgttcacgtctggccccatttcctaggtatcttcttccagaaatgatcctgcaagcaatgccccttcttttaaatcagcaggggtagcagcaagatttagatcagtgcactccaacagaaatacaatgtgaacttcctgcatgattttaaattgttctagtagccacatttaaaaaacaagaagaaatagataaaattaattgtaattatgtatttaactcaatgtattcaatattgtcattttatcagagtcaatataaactattaataaaatattttacagtttttcatactgaacctttaaaatccagtgtgtatacatttgttggacttctcaatgtaagtgctaaatttcatcagaaatactcaatttgtatttatttttcatgaaatgtcatagaagtagactgggacatacctaagccaaacaaaaaacacttgaaagttttccagtaatttaattgatacagtttttatatttaaatttaattttattgacagtatattaaaaaattgaattcattattcccaactagccgcatttcaaggactcagtagccacagcacagccctggttgatgactagagcttcttctaaaatcctcgtaacccaaccaaacaaaccaaataaacctgcaagcgacaatatctccccagggtatggaatcaacagcattctaattccctctcgtgtctagtaattcctctttgcggccatagcaaatctccctgagcaatttttttttccctgtgacaaaaatcatactatgtagttttacttgaaagccacagaaagacctaacaccatccatgctgcgtgaatttcttgatttttttcaggttgctttgcagatgatgttttaattagggaagcccattcgagaatcttcctaaagacatataacatcctcagccatctgaaactatctgaaccagtctgaaaatctgaatgccagaaccacccctgcagtccaaacagtttgtggactatgtctaaatagtctgttgcactaaccacaactgaggaatttatgagggcattaaagtactgtaaccaaaatgttgtcattcaaaggctcgcctcgggaggagtggagtattccgagagctagacgctggggctctggcaagactccaggcaaagtgtcaggatcctgggatcaaaaggtgattgagagacgtctaattgaggagtgccgccctgatatttgtggtttcctttccagcagtggaatttggtgcagatctttgaacagctccacagccagctctggggccctgcaggaacaggccagggtggattcctggaaattacaaataatgggggttgggcacttgtctgcatctctctgggactagactcgtggtttttaattgtctttacccaaggcaggacattctaaccagtagctgggatctcgcagtgtgattaaatttatacttaaggctgatgcgagtgctcaaaaaaattaataaaaagaaaagcaaaaagatggtgaaaaaacacaaatgtgtacatttgggaaaaaggtcacaggctgttaatacagtcatgcattacttaacaatggggatacgttctgagaaatttgtagttaggcagttccatcattgtgagagcatcacagggtgcacatcacacaaatctaaatggcacagccatactacccacgtaggctatatggtatagcctattgctcctaggctacaaacctgaacagcgtattactgtactgaatactccaggcaattgtaacacaatggtaaatatttgtgtatctaaacatagaaaaggtaacagtaaaaatacagtattatgatcttatgggaccaccattgtatatgtggtcagtcgttggcctaaatgatgttatatggcatgtgaccgtataaacgttaaaccattaatcatccaactcattatatgtataatttgtataataggtataatttggatttttggcacctttttggctatcatagtcatttcatttgatgtcttatgcaaatacatctctttaaagtactttcttgtacttgattaatttcccagactgttaatatgttttcactgtatatcttctggtgcttaacattatacataaaggtggcaggggacataaggggaagagaaaagataaagtgattctttcctttacgcctagaaaagattggagtcttgatgaagggaaaaacatttgtttggtcatttaatcaatattaactgagcacttaatatgtgtggaacatgaggggtacaaaaagatggagggaggtggatcattatataaattccagctttactacctactggttatgtgacgttaggccaattatttacattttttgaggctgtttcctcaatttttaaatgaagttaataataaaatgatacaggagaaaaattatgtagattactaataaattgtgtctactataatcacgattattaaagatgagtcatcacctcctcaatcaccagtagacttttttgttttgctaatttgggttgccagaaatatgttgttatacctagacaacaggccaccatcatttagatttggtgtagatcattcattggctagtttacattctcacttttttgaggttcaaatgcctacatttcttgcctaaatcaaaacttacatttataaaaaaaaaaaaatacctttatatccccaagggaagaagataatgtgacccaggaaaggctttcttgttttaaaattaacattttaaaatgaactatgtagaaatccagccacagaatcctaacattagagaaacacagggtagtagacatgacttagaactaagttcctgctttcaggtagcacaagaggatgagatgcaggcatgttggggtcacgtgagctctcttttgaaattgattccacaggtcactgtgaaatccaaatatgcttaattttaagtgtctttgctgcactgagacattttaccttatttgtatgcaaagccatcccagctttacatatggccaccttatcaaattatcttattaattctgaaattttcttaactttcaacatatgcaattgcgtcattcctaaataatgataactctacctttttattttcattatgtacgctttcatcatgtttttctctgtgtaatccattaaataaaaattctaaaaccttccccagcaatgattgtcattggaatagctttatacataattattttactttacatattatgctgtctttaggtaaatactgctaatttgaagaacttttacttttttagcatttctattaggaatgagacttgataagagtgatcgacattgactttacaaaaccagatttggttttagttgtcatttccggtgggtttttttttcatatattattaattttgtctttattcttttaattctcctctccaactttctctatgtttattttgattttttaaaataataattgtattgagatattcacttactatagagttcacccacttaaagggtagaattcagtggttgttagtatattcaatagtgtattcacagatatgtggagcaatcaccatagtccaacttaaaaagaaatgtcaggctgtttagctataacctccaaactcctattgccccccaacccctaaggaaccattcctctactttctgtttctgtggctttcccaattctggtcattttatacaaatggaatcacataatatggagtcttttctgacttgcttctttcacttcacatgttttcaaagctcatgcatattgtagtaagtattggtacttcattcctttatatagctgaatcatattccattgtacagatatacgtttgtttatctactcatcaaataagaaacatttggatttgtgccacctttctggctattcataaataatgctattataaacattcatgaatatgtttttatgtggctatacattgccagttctcttcggtagatgttgccggatcataagtttgaccattgaagaactgccaaattattttccaaagaggttgtacaattttgcagtgtaaaacggttcaggtttccccacagccttaccaatacttatggccttactctcagattctagcaatcttaatgagtaagtgtgaagtgaatctcactgttgttttgatttgtatttccatgttgactaatgatgtttagcatcttttcatgtgcttattgaccattcgtttatcttttttggagaaatgtgtcttcagtttctttgtccatttaaaaaattagactctttttatgatagagttataagagttcttatacattctaaatgtgtctcttctcaaatacatggtttgcaaatatgttttccattctgtagattgcctttcattttcttgataataatatcctttgataaccaaagtttttacacattttgataaagtccaatttatctatgtttcttttgttgcttatgcttttgatatcatatctaagaatgcattgccaaatccaaggtcatgaagatttgccccttataattttacctcttacatttaaggccttgacccatttttgtttgttgttttggttctttgtttgtttttcagacagaatctcatgctgtcatttaggctggagtgcagtggtgaaatcttggttcactgcaacctctgcctacctggtttaagcaattcttatgcctcagcctccagagtagctgggagtacaggtgtgcaccaccatgcccagcaattttttgtatttttagtagagataggattttgccacgtgggccaggctggtttcaaactcctggcctcaagtgattggccctccctggcctctcaaagtgctaggattacagatgtgagccaccatgcctggccttgatttggggttaatttttgtataacaatgtgaggtgagggtccaaattcattcttttgcatgtggtatccagttgtcccagcaccatctgttgaacagagtattcttttcttattcagtggcctcagcattctagtcaaatatcggttgagatagatacgtgggtttatttctggactctcaattctactccattggtctatatgtctatccttatgccagtaccgcatcatttggctactgtagctttgtagtaagtttcaaagtccagaagtcttctgactttgtcattctatttcaagattgttttgactattctgggtcccttgcaattcttgcaatttcaagtaattttcatattctattttgatttccttgtgcttttttgtcaaaataacatcatagctcatttaatttcaatttatttttataaataacaaaaacaaaacaccataattttttttccaaaataagttttagctataaatcacaggtgttaatacagagttttctttttcattagctatatattgttgggtttattttatcaaacacaggcattagaattgtgttctttaaaatccatggggttttttttgacgaagtctcttcttttttttttttttttttttttgagacggatgtcacccaggctggagtgcagtggcacaatctcggctcactgcaagctccgcctcccgggttcgcaccattctcctgcctcagcctcccgagtagctgggactacaggcccccgccaccacgcccggctaattttttgtatttaacattttttatgtttatttcatgttttcttgtatgatagtcatggattttgttctttaaaactgtacagtctggaatgtgttaagggtttctttgaaaccaactacatgatcaaaattcatagatgtttatgggcataagaaaccatatataattttccatttgttacataggaaaggtctatactatacatcttgatgattgtatttttccaatatcctgtttattttttttatctaccatcaagttttgaaaaggttatatgtacatatataactatatgtatgtagtctctggatcatgcttttttaacaccatacttttttttttttttttgagacaaagttttgctcttgttgcccagtctggagtgcaatggcacaatcttggctcaccacaacttctgcctcccaggttcaagcgattttcccctcagcctcccaagtagctgggactagagtcatgtaccaccatgcccggctaattttgtatttttagtagagatggggtttctccatgttggtcaggctggtcttgaactcctgacctcaggtgatccacccacctcagcctcccaaagtgctgggattacaggcatgaaccaccacgtccggccactcaatttttgttttttaagattcaatcatgtgtgcagctctagcttgtgcattttcactgctagttaatatttttttaatggtaatgaactatgatgtttttaactgtttgcctgttgatagagatttgagctattcctatttcatttgtcctggtgagacattctcgttcacctccactgaggcacaggaacaagaatttctgctgtatatacagctatgagtggaaataattacatttgtagtatttgtggcaagaaagtgtggattttcttactcaggctctttgaatttttgtagaattacttgatgccctagtccatgattaacttcagaaaataaaccatgtgtgcttgaggagaatgtatatctcagggctgttggatgctgagttctacttaagggcatcagtacaaatttataatttgtgttgttcaaacctaaatattgttattgacttttttatctatttgatttatccataattgagagagatatgtggctatttctgactcatcttactctgaacatttcagtgttcttatatttcttatgttttagttgtgtctcttccaaatgcaatggagtttgatatttttcttaatctaaccattcaatctctgttcctttttttttttttttttttttttttgagacaaggtttcgctctgtgacccagcctggagtgcagtggtatgatcttggctcactgcaacctccgcttcctggggctcaagtcatctcccacctcagcctcctgagtagctgtgactacaggcgtgggccacctattctattttcagtagaaaccgggtttcaccatgttgcccaggctggtcttgaactcctgagctcaagcaatccacccagcctcccaaagtgctgggattacaggcgtgagccaccatgcccagcctcaatctctgtattttagaaggtggatgtaatgaattcatgtttttggtgattatttatatatttgaactagttgctactattttactttcttatttctacttgtcccacatttttggacaagttttttctttattttttattattttattaaaattatactttattttaaatgttattataattatgtaaaatattcacatataaagaacacacaaaagacaaaatgtacagctcaattatttaacctcaaaatgaacctcaaagtaccacaaaatcaagaaatagaaaaaaaaaagcccagaaacctcagccatgtcttctattaatcattagttcctttctcctccactattctgacttcttgcatactgattagtttcacctactgaacattataaacaaggaatcaaacaacacgaattcttttgtattgtgcttatttaattcatttgtgcgttttgtaccaataatattccattgaatatcatatgtaacatttcactgaagaacatgcaacagtttgctctagattctacccttggtggacatttggtttgtttccaatctgaggttattacaaatagtgttgtaaacattcctgcacaggtgtatgcatttctgtggggaatatacctagcagaagaattgctgtgtcattgaagatacacatatattcatcttttgcagccagattattttcaaagtggtgataccaatttacccttttacaattaatttatgagagtttctattgctcactaatacttggtattgccagtccttttcatattagccagctttatgtgtattccactgtgatttttatttgcatttctccaatgacaaagatctaacacctctccctgtgtttactagccttttagatatgcatttttgaagtacctgatcaagtcttgtgaacatttttctgccaggttgtctagtggtttcttattgatttttaggaattctttttacatttggtggcgggcctttccaattgcttaatggcatgatgttagccatacaatgcatattgtatatatacttgttacatactatttaataagatgctataagacatcttacaatactcatttattatttcacaattctgtaggtcagaagtcttggagagtttggtggggttctctggtcacggcctcacaagggtgaaatgaaggtgtcaggcaggatgaattcttatctagaggctgaaggggaagaattttcctctaagctcatttaggttgttggtagagtacagctccatgtggtggtagatctgagtttccctttccttactgccacccgcattccatctcagatgactccctccaagttcaaaggcagcaatcgtgtgtgtagtgtttctcactcctcaaatctctctgacttcttatgccttctttttctgccaccaaaatttccctgcttttaagggctcatgtgattagccctggataatctctgttttgacaaatgaaacatgccatataccataacacaatcataggagcgatatctcatcgcatccacaggttccagggattggggaattaagtcttggggatggagcattttaaaaattcaggcacccacagaaatattttgatgaagagaaattcttaatgtcaaaatggtaaaattcattataatattttattgtatttagagtgttttgtatcttgttgcaaacacttttttgtgacatggtcataaatatattctatattatcttctagaagctaagttgttttgtttttcacatatatatttaaaattcatgtggaattgatttctgaggtagaggtcatttaattttttctgtatatatattgaccatcgtttgttgaaaaggccatccccagtatggtatttccccactatgctatagttttgtgaccatgcagatctattcctggacgctattattttccattgctctgttcagctatatttgcaacaagtaggagtatttctacactcttaattattgtaactttatgtatatatagtcatacatatatgtatatcttgatttttcctgcctctttcagattctatttagatttataacggtgtgcttgagaacatcttttagcttttcctttagtgtggtcctgatgggaataaattctctcatttttgtcttgtttgaatacataaatgtatactatattattaaaaattagttttcaatttgtagagaattctagaaaggcagtatttttttttattgtgagataacttaattaacttgtagcttccattgtttaggttgacaaatctactgtctgtctaaatgtttcttctttaaagataatcttcaactccttttaagattttctccttgtatatttttaatagtttgactatgatgtgtctgtaaatgaatttaattttgatacttagaggcagtacaaacagggcttcttgaatatctgacttgtctcattaattttggaaatatctcactcactttctcgctaaatattgcttctgtttctcttcctgcctttcttcttcttagatgtcgacagtacatttgactttttcttttactctatgtaaaatacttttaatccgatcattcattcctaacaagcatgctatttttttgttcagtagttttgttctcttttatagccccaaatatattattataaaccttactatttctccaaatgtaaatacttggcttaaattttaatatctgattatcttttctttgtacacttcaagatgttttcctgacatcatttttttttcttttaaacgatatcatctataagtttcctaagtgcaagttgcttggttttaaactctgtctatctctacagatatctttatatttaccctcattcttgaaggtaactttcttggcaaccaattctaggttgattgttactttctcttatcatttcaaaaatgttattccattgtcttctggctttcatatttgctgttgaaaaggttgttatcatttatttatttattttttccattcctgtgtatgtggtgatcttccttacttgcttctaactttttttttctgcttttcagttttgctctggtatatctagaaatttgttccctttaatgtacttgttttttggcatactttgtgcttcttgggtttttgagtttatggtttaaaaaataataatttctaaaaaattacaactactacctcttaaaatagtgcctttcctctgttcactaatctctactttgggtacccaataaaatgtacagtagactttattattccataattcatatttcttaacatctattacatgttttccatctccctgtttctctgaactgcatctttttttagttcttatctcctatttaatctaactttgaaagtttttgtttcaacaatgatatttttcatttctagaccttttgtttcttcaaatcggcaagtacactcttacttctggtttacaattatacactgctaaagcacctaaaggaccgcatttgatggtctcttgttgcattctcctctttgtaatagcatctttaatttttggaacatttgagatattcaactctgttttgtatttaacagttccaatatttgcaatacttgtggatctaagtatattgtctgttgtttctgccaaatgccattaatagtagcttcacttgtaatatgtttgataatgttgatctttgatgtaagcttattgcttaatcttagtttctgggaatcatttgggcctcaactggggaaggttttatcctgactgaatttacttctgcttctgctggtagccagatttaattaaccttgctcatctttagttcttcagagggtctttattcgtgagtgaaaatacctcgctgtgagaacttagcacaccaatagcattgctgctgtgggcaacctaattcaagcaattacattctccaagatattcactgctctagtctgggctacctactaaatgggaaacaatttacttattttcatggcttcctcacctcttttgacacaactagtacctcagaaattgtttctattcatcacattgtttttatgaattgtgttgggggaatttctgaaagcattcatcaaattaaccatatgtctgaagttgaaatttgtattccttctacagttattgcttttcttatatttgacctttttttcttcttctagaattttccttatttgcatattaggtatattgtatctatcctctaagcttcttcttcttcttcttcttctttttttttttttttttttgatggagtctcactctgtcatccaggctggagtgcagtggcgagatctcggctcactgcaacctctgcctcccaggttcaagcaattctctgcctcagcttccctaatagctgggattacaggcgcccaccaccatgcctggctaatttttgtacttttagtagagacgggatttcaccatattggtcaggctggtctcgaactcctgccctcaggtaatctgcctgcctcagcctcccaaagtgctgggattacaggcatgagccaccgtacctggcctcctctaagcttcttctattctcatttatggttttaatttgtttatgttccttgtaaaatatttttttcatttgatcttgcagaccatcaaagcgttttctcagcagtagctagtctgtcaatagtttgattgcatttacaatttatacatattgttttcagatccagatgctacgctttgtgctctcttcatctttttgagaattcttactataatgctatcttactgcagaaccttagaccatcatgcccttagtaatggatgtgatgattagttttcttttgcaaaactaaaaaattttaaacatattggatatttttcagaaatatcagaaatattttaaaatcacggatatggtgattacttttctttttgactgaaaatgaccatcactgagttgtcacagaggctttcctttcattttttaaattttttttgagacggagtctcactcttgttgcccaggctagagtgcaatggcgcgatctcggctcactgcaacctccgcctcctgggttcaagctattctcctgcctcaggctcctgagtagctgggattacaggctcccaccaccacgccgggctgatttttgtgcttttaatagagatggggtttcatgttggccaggcaggtcttgaactcctgacctcaggagatccacctgcctaggcctcccaaagtgctgggattacaggctgagccactgcgcccggccagaggctttcctttctatagtccttgcaaaagaaagctgcagcaagttgaacaagctttgaacagtgtacttcaaccccaggatttagctaaaagaaccagcatgtatatggacccatgagaaaagaatacaaaggctcatatcaccttgtgatctgaattagtgccctgtttttttgttttgtttttaaagtgagttagacaatggactctctgtctcaggaagttgaacaaaatttatagaaggattgcagctgccaaaagaggctgaagtcaggaggatatgggctagagctaagaccatagggagagtgataaaccaaagccaggagtgagatagatgaacttaagagagagcaataatgttgagtacacagagaagccaccgctcatccattccaggtaagccccagtaatcactcccttttagccattcctgtggcatccttattccttggttttgaacacacctcaataaaacattttctcctgctactgagcagctggaacaaaatcattgccataaaactcaacagggtgccgatctctgatacccaaggtttctaatgaatagggtactggacagtggcaatctttgtatataaaatctggggaaaaaagaaaatttttctgattgtttacgataactatataacctttcctccaacttatcccaagtctttgattctctggaaaaaagtataggtgctgcttatgatgaacaggctttagtgtacccatatcatccctgtctcttggagtccatgcccttatgtaattctctctccttgagggtaggcaagacctgtgacttgcttctaaccaatgtggcaaagataatgcatgattaggtggtattacatgcaacgataggtggtatatctcatgattaggcagtattatatgcaaaggtggtgggatgtgatggccattattacattactttatataatactccatcctagtagattgaaactaaagtccctccttagaggcttaatgaagtaagtggccaagttggagaagcctaattggcaagaaactgcgggtgcgctccaggatctgctgtcagcgcctaagatctcagagcaaccttcagtcaacagctagcaaaaagccatggccctcagtcatgcagccacaggagattaattctgccaacatcctgaataagcttggaagcagattcttccccagctgagccattaaatgaaaatataacctgaccaacactttggttacagcctactgactctgaagaaatcactcagctaggctatactcagtttcctaactgtgaaataaatgtgtactgtttgaagccactatgtttatggtcatttgatacgcagcaatagaaaacttaggcactatcaaagcaagggatgtaagaaagcacaaaaccaaccagacgtggtggctcacgcctgtaatcacagcactttgggaggccgaggcgggaggatcatgaggtcaagagatggagaccatcttggtcaacatggtgaaaccccatctctactgaaaacacacacataaaattagctgggcgtggtggcgtgctcctgtagttccagctactcgggaggctgaggcagtagaattgcttgaaactgggaggcggaggttgcagtgagccgagattgcgccactgcactccagcctggtgacagagtgagactccatctcaaaaaaaaaaaaaaaaaaaaaaaagaaaagaaaagaaaaaaaagaaagtacaaaaccagaaggctaactctgcccctgccttacccttttcagtgtggcctgacacaggcagaaccatgccacgtgctgtttctccacctgggttactacattgctttatgatctatccttccttaggcatttgcaagactccagtgtaccaagagaaaattttatcaggctatgattaagtgtgtttattcaccaaggtaaactggctgtggaaattgttgaattacacttgagcagaactttaactagttttaatatgtgtttacccacattacctcacttgatactcattataatcctgcacgatgtgtaagtattctgttgaagctgagagattaagttgtttgctcaagtttcccagcgagtagtggcagagccagaagtgaatctaagtcttctaaaaccaaggccagttttctcctttatgtgaaaatcacctcttagagagaaggccttacctgaacctccagaataatgtttaattatgacaatatggtctcagttctttcaaaagtagaataaaattagaaaatggagatcagcacttcctgtaaaattgtggaggtcatctggtatagagtagttaatgaaagaatgtaaatgtatcatatgtgatggaatttctctgtcgtcatcaaagaacattaacagtggacacatgtactctcatgcatgtgcccttgtgtcaagtgttgaatctatactgactaatgtactcaaaggaaaacttcaagtacagacattatttgtactcagaggttagaagtcaaaaaatcaaaagtctactgtaggctttggatagaataatgaagtcttgcttatctttggaggaggataattatcccctttgacattctgaaaaaaaaagtttgtgtaacttaaaagtcttggaagtttggtataagaatgagcatgtccaaactgttctgttacttgaaaagtgattgtcaggccgggtgcgatggctcatgcctgtaatcccagcactttgagaggccgaggcaggcggatcacgaggttagggatttgagaccagcctggccaacatggtgacaccccgtctctactaaagacacaaaaaattagccaggcatggtggcaagcacctgtaatctcagctacttgggaccctgaggcaggagaatcgcttgaacctggaaggcggaggtttcagtgagccaagatcacgccattgcactccagcctgggcaacactgggcaacagggcgagactccgtctcaaaaaaaaaagaaaagtgattgtcaggtaaaaacaaaggcaaaaaagatgagtaaggaacttactcttacttccaactagtcaaagaagtcttccagaatcaataagacttcttactttacagtaaattctagtttatgtggtaatattgacgtgattcctgatccaaatcagttttccaaatgaggttttaataattgtatttgatgactacaaatgtactctatgctcggtgggaaatgcaatggtctcgacccattttctaggtgcaagtatgtggtgataactcatagacaaagatggtagccagagatatgatgagtcagattctgccaacatcctgaataagcttggaagcatatttcttccctagctcagggaaggatagcctgaccaacaccttggttacagcctagtgactctgaacaaagctttcgactttgaaaacagagagagcatttgatcatgtatggaatttgagagaaataggaagagtcagggttaactaggtaattttttagcttaagcaactggaagaatggagtgtataggaattcagtctgggaaatatcaaatttaagatattttatcagacattcatgtgaagaagttgaatagatagttgggcaaacaaatgtggagttcaagaaagagatctggctgcagctctaatttagttaaccaaataatttctccaagggattgaatgaggcagagaagaaaagagaccaaacattaagccccaggaaacactggaattaaaaggtgaggcagaagaagtagaacagcggagatgactgagatgactgactcaatatattatcagtgaggtgaaaggcaagctaagaaagtgtttggtgccttggaaaccaggtgaaaatgtatcaaagaaggaaggaatgatcagttgaaaatattgttgatatggcaaaaaaaaaaaaagtgagaacttaataattgacattggatttagcaacatagagcttattggcaactttggtaagaggagtagtttgggtaaagtttaaccttgggtgttttgggtaaagtttaattagaatgaatttaaaagacaatgggaggaaacaaattggagacattaggattacataactttgttgctgccgttgttgttacaaaaagagttttgctgcaaaaaagaacaaataaattgtataataatcaatgagtgaggtaaggccaagagaagaggactttttggttttgtttatttttaagaaatagtggcatgttacttgactgataggaataatatggtactgatatttaccatatcagtcaagtggcatgttacttgactgataggaataaaatgggtgagaagagttcactgttgaataagcttccccgtgtgagcaaggggtcaggagcctggtgccttagtacagctgttggccttaggtgggagtggagtgtggatggtttttgtgtaggaccacacagagagacagaacgtgtggtgtgcagacaccggcaggtgggtagatgttgtggtggacatctgtggaggttctctgctgattgctttgaagatctcagtgaagtaagaggccatatgtctaactaaaaataagaatggggaaggaggtattggaggtttgagcagagagggtagggagttaaattgtcactcaggagattggaagagaattgtctaggcaagtatgtacaattgcagacagcattaaggtccacttgagggggataataatgaacttaaattgaagccagtgtgtttgtacaaatttttccacctatattcaacttgagtgcagcagcaggagaggcagaaagttgagtttaaccaacgttctgcttttgctaagtgagaattataaagttagggaaggacaaaggagttgggggtatgtccaagggaacaattcataattatcgaccttggaatttcagctgggtgagaaggaagtaggacatcaaaatgtgaaaaacattgaaaaatgctttttaaatggaaagtcctagtgaaattgaaaaatttcagggtcaggataccaggtgctctgagtagataagtcagaatgagacgtaagagatgacggtagagagggctttgagttattggtaaaaggtctaggttacaggcagctgaggtatgcatggtctattatcatgatctaatcactttattatcttgggattttctgttatcattatcattatttcagtcctttattatgtgttagtaattaagtattcagtgatgtcaattttatttctttctactaaatttgttgtatatttgtgcaatttgggccctcaattcatcctctccaattcatttttctattttattctcttttttaaccatatccttttcaatgtcttttatcattgaatttatgctattcttttttctttctttctttctttctttttttttctttttgagatagagtcttgctctgtcgcccaggctggagtgcaatggcatgatctcggctcactgcaacctccgcctcctgggttcaagcgattctcctgcctcagcctcccaagtggctgggattacaggagtgtgccaccacacccagctaatttttgtatttttagtagagacagggtttcaccatgttggccaggctggtctcaaactcctgatctcaggtgatccactgcctcagcctcccaaagtgctgggattacagacatgagccaccacgccctgcccgaatttatgttattcttacactgctcctagaactttcataatttgcatggattctttttaaaatgagacataatctacatacagtgatgcatacaatttcgatctgttttgacaaattacacctgggtaagtttctctctctctcttttttttcttttctttttttttttttttttgagatggggtttcgctctgtcgcctaggctggagtgcagcggcgtgatctcaaacctgggtaactctctcttatcaagacagagaatacttagtttatcctagaaatcccttgcgcccttccccagtcattcaacctcagaagcaaccactatcaccatagattagttttgtccattctagaatttcatgtaaatgaaataatatagcacatattctttggtttctgacttttcacccaaaataatgtttttgagattcatcccaactgtcatatgaagcagtagtttattccttcttacaattgagtaatattccattgtacaatgtatctgttcttcagttgatgctgatgaatatttcagtttgggattattaagaatatgctatgaatatccttgtataagtctttttgggaacacatgttttcattgcttttgataaatacctagaagtagaattctaggtcataggataaaggtatgcttttaagaaacttccaaacaattttcaacgtttgcacaattttactttcctaccagtaatgtatgagagtctcagttactttgaatcctttccagtatttggtttgatgtgatcaatcattttctttttctttttttgcctttttattatttatttatttatttatttatttagtgacagggtcttgctctgtcacccaggctggagagcagtagtgcaattctatctcactgcagcctagaattcctgggctcaaaccatcttcccacaaagctagtgctgtaggtcacaccgccacaaccacacctggctgacttcaaaaaaaaaaaggtttttgtggaggcagggtcttgctgtattgcccaggctggtctcaaactcttgccctcaagcaatcctcccacctcagcctccaaaagcgctgggattgcaggcatgagccaccatgctcagccctattattttcattttaaccatgctcagcccaattattttcattctaatggtgtgcggtaaaacctttttgtggttttaatatgcatttcccaaatcactgatgccgatgatggaaactttcttacgtatttttgtctattctcctgtcttcttttgtgcagtatctcttcaaatctttgcttttttttattaggtcatttttcttttattattgagttataaaagtttttatatattgtggatacgggcccttcacaagatatatgtgttgtgaatattttcttccagtctgtggtttgcccgttaattttcttaatggtttctttgatgagtaaaagtttgaaactttgatgaacttccatctatcactttgttaatgttttttgtgtcctctctaaggaatctttgtatctctaaggtgagaagatttttttttgccttatggtttcttctagaagttttatagttccgggttttacatgtagcctgtgatctacctcaaattaatttgtgacttgttgtgagatagggattgagcttctttttaccatattagaatccagttgttccaatatcatttgttgaagagactttcctttccgttgaattgctcttacattttttcaaaaatcatttgactgtatgtaagtgggtctatttgtgggctctgtattctgttccaatgataacttgtccatttttgttgttgttaatacaacacagttctgattatagtcacttaatagtcttggccaggcgcggtggctcatgcctgtaatcccagcactttggaaggccgaggcaggtggatcacctgatgtcaggagtttgagaccagcctggccaacatgatgaaaccctgtctctactaaaaaatacaaaaaattagccaggtgtggtggtgggtgcctgtaattccagctactcgggaggctgaggcaggagaatcacttgaaccctggaggcagaggttgcagtgagctgagatcgtgtctctgcactccagcctggacaacaagaacaaaactccatctcaaaaaaaaaaaaaaaaaaaaaagtaagtcttgaagttaggtggaataggtgctccaactgtgttttattttcacagttgtttcgcatccctttggcatgcccatataaatttcaaaattgtcttgtcgatttctacaaaaaagaattctgcttggttcaatcagttaggtttggggcaattgttatgttaataatattgagtttgcaatccatgaacacagcatattgtttttgttgtttaggttaaatgtaatgtctcagcaataacttggtttttttagacagcaatctaacatatctttgttcattttatctctaggtactttatatttggggatgttttgtaattggttgtattaggccatttttgcattgctattaaaaaatacctgaggctgggtaatttgtgaagaaaagatgtttcattggctaatggttctgcaggctgtataggaagctagtgccagcatctgctcctggtgaggcctcaagaagcttccaatcatggcagaaggtgatggggagccagtgtgtcatatggagagtgagaacaagagagatggggtgatacacacttttaaacaatcgtatctcttgtgaactcacagcaagagcacactcattaccatagggagggcaccaagtcattcgtgaggggcccgcccccatgacccaaacacctctcaccaggctccacctccaacattaagtgttatatttctgctgggtgcagtggttcatgcctgtagtcccggcactttgggaagccgagacgggcagatcacgaggtcaggagatcgagatcatcctggctaacacggtgaaaccccgtctctactaaaaatacaaaaaattagccgggcgtggtggcgggcacctgtagtcccagctacccgggaggctgaggcaggagaatggcgtgaacccgggaggtggagcttgcagtgagcccagatcatgccactgaactccagcctgggggacagagggagactccatctcaaaaaaacaaaacaaaacaaaacaaaacaccaaaaacaaacaaacaaaaagaaaacaaaacagaaattagccgggcgtggtggtgtgtgcctgtaatcccagctacaatggaggccgaggcaggagaattgcttgaactcgggaggcagaggcttgcagtgagccgagatcgcaccactgcacttcagcctggcaacagagtgagactccgtctcaaaaaaaaaaaaaagggttatgtttcaaaatgagacttggagaggatacatatccaaaccatatcaatggtattttagtaaatttttaaaattctgaatagttttagatttatagaaaagtcgcaaaggtaatacagagttctcccatacccctcatccaatttcccttattgctaatgtcctacattatcatggcatatttgcaacaatcaagaaagcaacactggtacattaccgaaaactacattccacactttattcagatttcactatttttttccagtaatgtcttttttctgctccaggataccacatgacattttgtcattgtgtctcccctctctcctcttgtctctgacaatttctcagtctttccgtttttttttaaatgacattgacagttttgatgagtcctggtcaggtatgttgtaaaattttcctcaattttctcaccattagactgggattatgggctttggggaaggctgccatagagaggaagtgcctttcctatcatatcatatcaaaagttcatgctaccaactgatgacgttaacattgagcctctggccaaggcagcgtttgtcgcgtctctccactgcggagttaccgttcttcatccctcttcatatgctactctttggaagcctgtcacctcctggagagagcaatatttacatcaattatttgttggccaggtgcggtggctcacacctgtaatcccaacactttgggaggctgaggagggtggatcacctgagttcgggagttcgagaccagcctgaccaaaatggagaaaccctgtctctactaaaaatacaaaattagctgggcgtggtggcacatgcctgtaatctcagctactcaggaggctgaggcaggagaattgcttgaactcaggaggcggaggttgcggtgagccgagattgtgcaattgcactctagcctgggcaacaagagcaaaactctgtcacaaaaaaaaaaaaaaattatatgttattcttctgtaagggaagacttgtctttatttttatttttataataaaatgctacattatttattttgttgctcagcttgttccagcttcagccattgggagctctttcaggttggcttgtaagtccctttgacatgcatgccccccatcagtttgatttttgagcattttcttactttctcaccctacaggatactccaggctcatttttgtatgcttgttgcaccagtcctggaaccagccatttccccaaggagccctgatttcttgattggagaatagtaactgagatcagggtacttggcaggcttattgttacacaggtgttactgcttctaggcttctagacctaagaactgcctgagtatacacatgtaccataaggagttctatatgtatgtattacatatatataaacctaaacctgacttcatgctgatgtctctcatctaggacaaactgtttcatcctagcttcctacctttgcttttctataactttcctcttgaacagcaagaaaactggctactgtcctccaccatccatttacttatttacttgtcaaacctgctatgcatggaacacagttctggaattgttagccagtaatcccaggagaaacaacattaccaactagaatacattgtataggtacagctgcttttgtgtttagccttcaagttttcagtcaaaatgctgttttccaaagttacttagttcaatccttccctccctcacccatatcctgcagtgaggttgtgtcgtacattgtaacacagttagattcttctgtcacattctacattcttttctggggtcccctaacatcctgtggctttattatttatttttttactttgcatacattgaaattcacattttgtgctataaagttttatggatctcgacaagtgcacagtcattaatcctctcctactttgccacacataatggttctatcaccctaaaaattcccttctgcagcctctttgtaatcaactactcctccttccccaagccctgacaattactgatatagggttttccattccttgacaattactgatacaggattttccattctatagctttgccttttccagaacatcatatgaatgaaataatacaatatgtagctttttaaatctggcttgtttcccttttgcacacaccagagaagtagacatatttttgaatacatcatatttttatggatgagtagccctgcaggaggattaaataaattaatagactttgtttaaaaaaaaagtgttaaatgcaaataaagtccagtcactggctgcagtgctctggctggcagctacgcagagcagagtaaaacacctgggactattgggtaaatatgtgaattgtggaaaagaatcactaccacttaagtagctctgttatcttcgctaattttctcccactcactaaacaattgtggaagagtttgttaggggagaatgagctttctttgggcatcagtgcggtccgttttgcaatagcattcaattggtttctcacttgcttctttctcgcttctgggaaaatgtggccatagagcttattttccttttgcatctgtctcagttatttttcatggatgttgcccgccatcctactccatgagtgtctccagctaacacccgcccccgtgcaccagtcatgccctcttgcctctcagctccatacccatccttctgcagcctacgccctcatctgctgacttcttacgttctgccaataggtggtgctagagagagaatggactcctacttttcgaatttagtgttgctcagagagaggcagctgcctggaactgggcttttctggagcttccagaaccttctatgtcctgtagagccgccatcagcagtggctatgccccttcctcagagatctgagcaccattgcctcaacaacttgcatcttttttcttttgttgcgtcagctcaggggtagtagcaaatttcatatctaattcctgggacagaagaaatgacagggccaataatttataaatgatgtagggatgcatgcatgtatgtacaaattaatatatgcctatttattttcttaaagtttgccctgttttcagagaaggaaattgaggtagtttataaggatagtcatttatcatatactgcttaatagcatataattttatttgtggaaatgactgtttggttattaaaggaaactgaataaccaaacttcctcagtattccttttgtgcttccagtctaccaacacctgaggaatcattcttgtattaaatcctgcgtgttcgaaattcccgatatcgtttctctttctctcactgtatcctgactgacaaaaccagttaaaagtccagtcttcccaccccattcttgtggcatcttactcctttagaagatttctcattcaggccaggtgcgggggctcacacctgtaatcccagcactttggaaggccgaggcaagcagatcatctgagctcaggagttcaagaccaacctggccaacatggtgaaaccccatctctactaaaaatacaccaattagctgggcgtggtggcgtgtgcctgtaatcccagctactcaggaggctgaggcaggagaatcacttgaactcgagaggtggaggttgcagtgagccgagactgtgccattgcactccagcctgggcaacaagagctagactctgtttcaaaataaaaataaaaataaaaataaaaaaagtgaagaagatatctcattcagcgcttcacatgattctcttttttgaagaaaacctcctgtagatgtcaggacattttataaagactttaatatctatactttacaatagggggagcatgtttactgctctcaggagcatcccacaaatggaaggcagtgcttttattattctgagatgaagtttcaatttcctttaatgaccaaactctgtcatttccacaaataaaattatatactattaaccagtacatgataaatgagtatccttgttaactacctcaatttccttctgtgaaaacaggacaaactataagcaaataaatagacatatattaatttctgcatacctgcatgcattcctacatcgtttacaaatgattggcttcgccatttcttctgtcccaggaatatgtaatttggtttttttacacacgtaaaaccagcaaataaacaaaagaaaattgaaaacaatagtaacgaggagagtatttacattttcagctactccattccccagtgtgcttggggtctagagctctaggttatcaccattttacacatgaggcttaaacaacagattcaaagaaattagtgacttggctcatttatccagctagtaagtagcagctcagccggcctcactatccatgattgtacgcaccattttcctaaagcctaaccgtcctcctacttcccaggtccctgacggtaggcagtatccttgaaagaatgcggctgtccctgtcaacctggatggagagttcagcccctggcttgggaagttaggcctctgaccatgagttttactctccctcctttaacttttccctcccgtgaagaagaaagttattttcaaacctccatctgttttgtgtttaacgtgcagaaaggttgcacattttcagtcagggaccttgttcataagcagtagatcgtacaacagtttattacacaagtggagatttttatggctggcctttgttgagttgccaactgggagaaagaacataacgtgcttagtggtccctatcaggaaaaatgagaaagcattaaataccagtcaaatcgtcaagcattggaaagctggtaatcaaatccagaaatccctggagtatggttgatgaggagggttttctcatcacattttttacatccataattgttttccaagtcacttgtgtcacaggcagtatcccaaagcattatgtgagaagtgcctcaatggtggaataaacgtttgacctagaaagactcacgtccactttgaaatctggccctggtcaatgcagggcatgaaactggcaccccaggaagagctttatatatttttaattacattatcatgttgaggacatcagctacatagaaacttgctcaagacttactaggcttctttccatacccaggccatattctctgtattcctaggagggaatgtaatttactggtggtttgtccccagccatgagacagagggtagaaaactccacaaagcatcctagtaaacattgcatctgaacaattccaactgtaaccagccaatgccaatggtaatggatcactcttgccccttcctttttaattttcccaaaagctcagaccatcacagaggctgcccaataaaagtcggtagagacctcagaaacattccagtcttccagcagttctcagcccaggctgcacgtcagagtccctgggggagcctcatcccagcctaattaaataaaatctcttggagtgggcgaggacattggtacattctccaggtgaccctaatatgctgcctggattagaaatcacgggtctagtctagctacctaattttactggtggaggaaattgagcctggagaagttactgtccacaatacttgattcacagtgccttggttctttcccagggaggcgttttctcacaatcacgctgtaactccataacttcatgtctcacatctcctaactctgtgtttataaaagcgacgcattcaaacctaacccagtccgctttttgcttgtgcacaaataccgtgcagtagcttgtatgagcagtaccagcagctctgtgttccccaaggtatatgaagaataatgtcaggactgtggagaaaatgcaggtaaagaacccacttttttctccagatggtccatggagaagggatttaagaagtggtccttaaacatgaaggagattcaacttcatttttcttattagtcccttattaaatccttctctgtttgtgtttgaaaaaacagctgtgtgttgtgtgtttgaaaaaacagtcctactttattcctgatgtcaatgttaatggtctccccatcaagtcccaaaatgttctaagatggttattaaattttatgatcaccctactctagatgagtcccaccaaaagtgtcacacttgctgttattgaaagatccttcctttttcaggctgagaatctcaagcctttttccaacccacaggccacgttctaattgctttcttcctgggagtctgataaacagtgttctcgatctgatagacagctaataccccggggggacattgctcggtagccttggacttctcagcttaatcgccctagctttaatgccacttaaatcagaatgtaagcactgaaagaatttcaggaatccaatgatataaattgtatttttagagccgtgaatgacttgagcgagtgaaacagtgcagtggcttaagatagttctctttagttttcccatgatttatcacaagcaagttcacagcaggttaaaataattgaatgcggtgatagcatacatactggcatgattttatgagccgtcattcataacatatttgtcccaaagcataatttccatgatagaactctgattcacatgtaatttttttgcagcgacgacacagttgaaataactccttcgtggaggctggctacattttcacaacgtctggtcccaagctagatcttcgggaaaagggatcaaggaaatgactattcctccaaataaaatgtaagtatatcctgataaaatgttcacttttttggagaataaagagaaatgttctttccgggagaattgtgactcggaggttatgccttgcgatctctacctatttctcactacttcttttatttttctttttccttcattgtttattttccacttttctcctaatgtactttttcttctacttattagctgtgtcccctgggcaagtaatttttccactctgtaatcaaatgctataatatggggatgataaaaaataactccacaggtcattgtgcagaatagagataatgaatgtgtgggtacatatgtgccccaaaactcagctgtgtaagaaaagcaactttctttttatatttttataactcgacttagtttctattttgaatccctatttggcttcatcgtggagatgtaatctcagtcaaagcaagatgctctcatcaaaacctacatgacatctacatggatgtcagatccatgtagctttccaccttcagccctgcctggatgttccaccattgccctgccggttagccaggctgcaggcaggtgctacacgctaggactccttcctgggaactcaaccatcacgtcaggtttcttggcttccctggatctccttctcaaatttgaaaagtcttgtctggtctggagaaaaagtttcccagcttttcatttaatcttccaaatctttagtttatgaccagaacctgccatttgagactcaaaagctaaaaatatgactcctctgttatctttgtttcactggttttcccttccctgaagctttacagaaggcctagctgcctaatggggagaaacacgggaaataccaaggaaaacatatgggcaaatatctcccaagaatttcccaccacttgtatgaagcaccaagaggaaggcctgacatacagtaggaagccagcaaaggtgactgcacctttatatgaaggttccaagtctggttccatgtttctgggctctgtgtccttggacaagttgtctttctgtgcctcagtttccccacctgcaacatggagatgataatagtacttacctcacaaggtaatatgtgtataaagtgttcaatgaattagttacactattattgttttttttaccactagtacaaacttctgtccttgaaagccattagcttaatactatcggcaaccataatagtgttgatgcagttgacacatagagtgcatcccacagaggagaaggtaaacatatcacagggaaagagggagctactggtcccaagtatgaaactgggatgagtttcctggaaatgcatccttctgggtaaaatctgggtataatgatgctgagtggtgagttaagaagcaatcagccaacttcagtcaaggcagttctcaggtgctagcaaggagaggcagattcttgaggatctagagtctgaatcagaagatggatccaagcttgtaacccaggggacaaaatggagtcagaagaaagggatgaggagcaaagttagagaaaggcaggctaagccaatgtgagaaatagatctggttgacgatggccagcagttgttggagaacagaatacgcgtggggcctctcctgagatgtgaggccactgaggggttttgctgagggagataccacttctgtgagcaaggacaatgagaggaaactgcgggagagagaatggtccaccagtcccaagctaaataaacctttttctctggcccatccagctgatgagcatgagaatgagaatgtgggacctccacccctgcacctgcctaccctccagtcccagagccagtttggtctatgtctttctcaacccacattctgccaggacaattgagcccgaatgggacagtggaaagggcatcgcatgggaagtcaggagacctgaactccagacccaatcaatgaccaactagcctgagactttagacatattccttcacctctctgaaccttagggccctcaatgaggaggtaggaccacataagaacagagctaaatgggcatagttagcggtatgggagccagagggccagtgatatgaattctgtctttgccatttaccagatgtaggtcaactaatttaatctctctaaactccagtgtcttcatgtataaagatggggctaatagcacacccctcacctgattaattggaagatgaaattcaagagtgtctgggacatgtttagtagtgttgtgaaacactatgcatactcaattgattgttgccaatatcactatcacgattatcagtggaacccaagatctctattaggtcaggggcaactaagatagttgagtgggagaattcaagactgcagaccctgcttcattaggaagagcagaagcgtttttctctgttttatttatctctctctctctcttttttaacaaaattaagtatttctcactgaataataataataatgttataaatcactggactaggccaagggttggcaaacttttttttttttgtaaaggaccaactagcaaatattttcaggtttgcaggccacacgtggttgtccactgcatattcttccggttttattagaattagggttgagttaggcttagatagagaataacagcatctattagggtagaatagtattatggtaactattataacacaaaacccttacctgtgtgtaacagaaatctcagtgcctaaacaatcaaaacgtatttctcacatcacagtaaagtgtgagtagggggttaggttgtctatgccacataatcttttggggatctaaaaatccttccttctagtggctctggaaacctctggatagaaggaaaaaagagatgggcccacattcaagaacatttcaaaaatgtaaaagctattcttagctcagggtctgtacaatcatgccccgtcagccgcttttggcctacgggccctagtttgcccactcccggatcagaccatctctcaggtcctttccaaagatgaaccaaacttcactgtgagcaatctctttctttctccatcaaagtaacctggcagtgaactctataacatctcccactatctttcatgtgataatatttttcatatttacaacagttgtcatattaagtgtttttgttacattttatgtgtaatgttacacagagttcctttgtgaacagttttcgtaaaggtggtgtattaattttcaagggctgctgtgaggcagtatcactaattgggtggcttaaaacagcagaaattagccgggcacggtggctcatgcctgtaatccgagcactttgggaggctgaggcaggcggatcacgaggtcaggagatctagaccatcctggctaacactgcgaaaccccgtctctactaaaaatacaaaaaattagccgggcgcagtggcgggcgcctgtagtcccagctactcgggaggctgaggcaggagaatggcgtgaacctgggaggcggagcttgcagtgagccgagattgcgccactgcactccagcctgtgccagagagcaagactcggtctcaaaaaaaagcagaaatttgtttcttcacagtctggaggccagaaggctgcattcagtgtttgaagggttgattctttctgagggagaatctgatccatgccttcctccagcttctggggatgaccaggactccttgatgccccttggcttgcagacacatcactcgggtctctgcctccatcttcacactgcattctcactatgtctctgtcttcacaaagccccttggattggggcccacactgatgatgtcatcttaacttggttaaatttcccaagaccctatttccaaataaagtcacatgcacaggtactggggcttagaacttctatcagtctccttgatggacacgattcggcttataacaggtggtgaaaagcatggggttgcctattcataactaagaactgttaaatattagaaatggaaaggactgttggttcccctgtgctgctgcagggatgagtaagattgatggcgtgtccaaacagcttaagttttacccttcactgtaaatggcagagagaacagtactactgctgctgctaccttgaagaatgtaaaatttgccttttaaaagtgtttttgttttatggacatggaacaatgaactagaaaatatggcacattctgtacccttcttctgcttttaacttataaatgctgtattcaaaatactggaaccgtgtggcttgcggttactaacaaaattaaaaataaaagcaaaaagccccttcgcatccatgtcacccactgagggaaatgcagcttggtgccctggagaagaaatggactttctggtgaattctcacccctttctgcaggggtcaggatttgaaaattactaccagctggttgtaattccatcctattttgaaacagatgacttagactgctaaaccatcatggggctaagatttattttcccctacttggactaagtcacaaagacccaatttgcacagtagagaaaaggaagaaaatatttttttttggtgagctcacctcacctctgccagtggaaaacctaccaatatctcagaatttgcacgagtgaattgggccatgccacgccatctctgatattccagagcaggaattgtttatcttttccaaattttcacagcactttctgtctctgcacctcttcagtggcacttattgtgagacttatgtcccttcctaaagtgcaaactctctgaaatcttagtaattactcaaggtggagaggaaggaccctgtggacagggagtgacttgaaatgctggaaaggaaagaagaagcacaggagcgaatccttcaggaaccaagaaggatggaacaaggttccaaactggaatagtcttccctgcataggaacaccaagcaattgggaatttcctgtaagcttcactggaagccagctaagcctgtaagggcttctgttggaattcagcgtcaggcatagaactctagtgaatgtgcctgaagaaaatcctatccaaagtttttggcataagcaagtcacttaacttctctatgcctcagggttctcatctatgtgataggattaatcatagaatctacctcataaaattgttgtgggaatcaactatcataatcaatgaaaagtactgagcacctagccagcctggcatactgttccccaaccttcccaaatttatccactaggaattgtaatagagtagatttgagttgcagcctgggagtccatgtgttcagcaagcatagttaagaagttcttgttttcaggcaaattcgggaagcaatgctgtagcaatagtaatagctcaataaagagtagttatttttattatgctaccttcatcatcattaacttatcattatcatcatcatcaccaccaccaccaccaggaattgaagataatgttagggaaaagattcagcaacaataacagattctataagcatcattgaatcagttatcttgactttggtctgatacgaagttattttcactgtttgtagaaccagtagacaggtaaccaactccaactcactcccgatttgaatctcaaggcgattatttccattttactcttatttaggtgaggagggatcttaacttagaacaagaacttgggccttgctcaataaattcagtggctataaatctaatccatgattcatttccatttttaccctggggatgaacacagaggagtctacgcagtgctaattaccacgttttgactggggcaccccaaagaaggaaagaatcacaggaccactccttaaagggactgaaaaatctcattgtccagtactttcacgtaggggcttctgccccttttaactactgaaactaccatgtatccattcttagacagccagggcaatgctttttataaactcctatctgtatctgattgctttaatggttctcaaaactccttacgatcagttacacttattttattttctattttatgcgatgttgttttcttgtttttttttcccccaatccttacacctgactcctacgaagaagaaaccaaatcgtgttattcattgtacttactccagtgtctagcatagactttctttctagtatcagtgaaaagattcaattgtatccaactataaggtgtcttaatttaaacttctttattttgagtgtacctgcctaaagcacctgactgttgtttttctacttctttacatatttgttgttaaaataataacaacagtagattgctctaaggggatgctacattaagatggcatctagtccaaagggcctttaaataattgaatttccttcatctcaggggtgccatcttttaaggggaaaaaatgaatagggaacagtggcgaggaaaaacaaagcaactatttttagcttgtcctctggcccaaaatatttatctagagctcccagaagctgggctggattatgtaaaatgctttacctagccccagctaccatatgtcttaccaccaaagcacaacctaaggtctcaaaacttgctactcccgttaagtaaaaattacattctgtagtgccaaagaaaaagcccccagaaagacagagaataacagtgtcttttacttaggatagggcggctctatatcaaagagttacagctaagcaggattaaggctgatttctcacatcaaaatacgatgtatgagttggtagaagaggactcttctccatgcagtgtttcagggatctataattcttctagtgactcccccatcttttaaggttctggaggccacccatgaatggaaggaaagatgtatcatggagcaatgctggggttgagatagtatagatcacttgagaccacattcaagaatccagccacaggacaaccctttgttataagagaggcacctcgctatgtgcacaggagagaaagagaagtgtcttggagaactcttagccagtctctgttacagacagtgagtacatgtgccccaaacctatagagtagctgacccaaccacgtactcaaggttgttgtagaaagtgtggtgtctgcaaaagggaaaataaaaggcagtgtttggaagaagacagagaaaacggattcccacacatcctgaactttcagtcctagtaaaagtggccaaccccagtattctgggatctgaattattagatcaatattctattttttcaaaagagtaacagaattaagagcttgtgggtatggggcagataagtcctttcttcagctagcagaaaatgcttggtttccctcaaaatctgtgttcttaatgtaatttctccctatttctaatttggcttcccattgaatactcaggcacagttctagaagcgagaaatattatctatggtatatataccatcataataaaactatgggttttcaaagtacaattttgttattttcttccctagggactatgtcttcaattcagataatgtgtcaccaggtggacgataatggtgacagttgatagccagcatctacctttattttatgccagaaactattctagacattttacagttacctacttcattcctctaacaacctataaggtaggccttattactattttctgcagcttacagctttggaaattgaaacacaaggttaggtaacttgtccaaggtcacacagtcatcactggggccagaattccaaccaaaaaaagaactaggtcttaaccactgcattcaaccactttggtgccaaaagctgaacatcccctaagagtatttaagaaaggaacatagacaatcgtgattttgtactcaattatttttttctatcaaaaatagagcttttgagtttatctaatcagcaaagcataacactagtgttaccatagcattacatttttaaaagtttagagcaagatatacaaatctaattttctagatacaagtaatcacctttcccaccaatcctaacaagaaatcttaatcctttccttctgtagtttatactgatttaaaacaagaactttttgttccttttatttcctatttatggtactttttaattctttcattccttagacgtttacttcatgaaacttatagcattacatttctgaaaatcacagaaaagaatttaactcctttatttctactttctatcaataacctcttaaatatggaataccctataaaattttttcttccgcaggaaaaaaataatcagagcacattcaaatgccttgcatattttcattattttcctttcattcagaagaatttcctccattgatcagttgctttacttcattatgtctctatgtcatttgagacctaaagctcccatgtttcctgttcgttatttgccattgcactagtgaggacatgcagtgtactgcgaaaggaagaggacatcactttccttactccagatcttctgggaaaagcattaagtgtttcaaccattacttattatgttagtttagtgaatttttttagatgttctttatcagactgagaaagttcttttctgttcctagcttgccgatagttaatatcatgaagggatgtcgaattttgttaaatggcttttctatatcaattgaaatgatcatatgattttccttcttgagactgctattgtggtggattacattgactgatttttgaatatcgacttatacttacatttccaagataaacttcatatagttgcagtgcattctttatttttttacacattgttgaacaaatccgcttttttaaaaaattcagaatttgtgcatctatgcttatgagggatattagtcaatagtttccttttttttttttttttttttcagacagagtctcacactgtcacctaagctggagtggagtgcagtggcacaatcacagctcactgcagcctcaacctcccaggctcaagcactccccccacctcagcctcctgagtagctaggactacaagcacgcactaccatgcccagctaatttttgtaattttcgcagagacagagttttgccatgttacccaggctggtgtcaaactcctgagctcaagtgactgtgcaactcagcatcccaaagtgctgggattagaggcatgagccaccacgcctggcccagtctatagattctccttccttccttccttccttccttccttccttccttccttccttccttcctccctccctccctccctccctccctcccttcttccctctctccctccctcccttccccacccgcattccttccttccttccttcctctcttcctcccttcctccttttcttccttcctctctttccttcttctacttgtctggttttagaatcagagttatgatgatctcataaattgagttgggaagtgttttctcttctacattttagaagagatattgtagaattgatgttcttttaaaatgtttaataaaattattcataaataacatgggcctggagaattttgtcagatagtcttaaactgcaaattcagttatagggctatttaagttgtctattacattttgagtgagtttaggtaatttgtgtttttcaaggaattgatcccttttgcctaacttgtcaaaaatgtgtgtatataattattcacagtatcccctatattcccctattattattaaatgccagtggggtctgtagggataacctctttcagtcctgatactggcaatttattcttgccttctttttgtctttgtccttgctgaaagtttatggattttattgatctttttaaagaaccagatttgggtttctttgaatttctctattatttttctgttttcaattttctctatttctaccactatattatttattttcttatttttgtttgagtttattttgctcttcttaagatggaagcttagataacttgtataaggcatctcttttctaatataagcttttaatgttataaatttttctctaagccctgctttagttgtagctcacaaattttggtatattttattttcatttttgtttaatagaaattattttctaattttttctttttgactcagattatttagaagcatgttatttaatttccaagtgtttggatatttttctcttatgcttcctgttatcctgttcctgatttctagtttatttttattatgattcaaggaaaatactttgtctgattttagattttattttttacataattctaactttttgttaatgtttcttttatgaacaagatatggtctaccttgactattccatgtacttctgaaaagattgtgtgttccactgttatgggtagaatgattttttaatactatttagatttacttagttgatgatcagctcaattcttctgtatccttgttggttttttataagttctgcatattactgagagaggagtgttgaactctccaaatataattgtggatttttaaaatttctcctttcactttcatgaattttgcatcatgtttttgaaagcgttgtcagtaggtacacacatacattggattattatttcttcatgatgaactgacccttatatcatcatataatgtctctctttatccctggtcatcttattcactctgaaatctatgtctgatcagttttcttttgatcagtgtttccacggtataccgtttctttctttctctccttccttcctttctttctttctttctttttttgttttatgatctctgttttaatgtttgggttatttttatttttttttattttagtaggtttttggggaacaggtggtgtttggttacatggataagttctttagtggtgatttctgagatttgatgcacccatcacccaggcagtgtaaactgtaccccacatgcagtcttttatccccctcccaccatttcccctgaggccccaaagtccattgtatcatcctgatgcctttgcctcctcatagcttagctcccacttatgagtgagaacatatgatgcttggttttccattcctgagttacctcacttagaatgatggtctccaatttcatccaggttgctgtgaatgctattattttatttctttttatggctgagtaatattccatggtgtatatatatataccacatttttttatccacttgttgattgatgggcatttgggctggttccatatttttgcaactgcaaattgtgctgctataaacatgtgtttggaagtatctttttcatataatgacttcctttcctctgggtaggtatctattagtgggattgctggatcatacagtagatctacttttagttctttaagaaatctccacactcttttccttactggttgtactagtttacattcccaccaacagtgtaaaagtgttcccttttcaccacatgcatgccaacatatatacatttttatttttttattgtggccattcttgcaggagtgagatggtatcacattttggttttgatttgcattttccctgactattagtaagttgagcattttccatatgcatgttggccatttgtatcttttcttttgaaaattgtctattcatgtccttagcctactttttgatagaattgtttgtttttttcttgctgatctgtttgagttctttgtatattctggatattagttctttgttggatgtgtagattgcaaagattttctcccattctgtgtgttgtctgttaactctgctgattatttattttgctgtgcagctttttagtttaattaagtcccatctatttatatttgtttttgttgcatttgctttgggttcttggtcatgaagtctttgcctaagccaatgtctagaagggtttttccaatgttatcttctataatttttaaggtttcaggtcttagatttaagtctatggtatgtcttttttatttattaaggcctaatttacttattattttgcaaatgagtcttgtaaatagcatgtcattggatcattcaaaaaatatattttgacaatttctgttatttagtttgtatgtttagatcatgtacatttagtgtaattctttatgtttaaagttagatctattattttactatttgttttctgtttagtctctggtttttgttcctctattttctcattttctctttcctatcttcttttgggttttttttttttttacattatttagcattccattttaacttatctactgtattttttactctattttacacatatatttctttctttgtgtgtgtgtgtgtgtgattactacatatttaccttttctcactgtccagttttatagtggaatgtaaaaactttaccattatgtaggtccttttatgttgtaactgtcttgtatattatatctacatacattgaatactccagctgacaatattgtcattgttttcttttagccatttaatatattttaaactcaagaggaaaaataatctcttttatttatctagttatttaccatttctgttcctcttcttttaatccttgatattttgaaatttcttcctagtatctcttttcttcagttgcaatggcttcatttagcaatttgtttagagtagatctcctgacaattttatctcaacttttcttcatgtaagaatgttttactttcaccttcatttctgaagaaaatttttctggacctagacttcttagttgatagttcttttctttaacacttaaaaatttccactaccatttggcttacatagtttctaaagagaaatatattcttatttgaatctttgttcctctagttagaagtagtatgccatttttctctggttgctttcaagattttttctttgtttttagttttcagaaacttgagatacccctaagtgctcatttctttaattaattctgtttggggttctctacacttatatctctaggtttatttctttttttccaaacttgggaagttttcagccattgcttcttcagttttttttccacgccatactccttctccttctaggactacaatgacatgaacatgagattttcgttattgtcccacaggccctgagagtctgttctatttttccaatctttttttctctctctcactcagcttagattgtgtttattgatttagctctatcttttttttctaagtaaaggtatccttagatttcatgagatggtgataaaaatcccaattgatagacaggctgatttttaaaatttatatgaaaaggtgaaggaacaggaactggaataaccaaacagtattgaaaaaagaaaactaaagttaaagaaattgttttttcaatttcaaaaattttgttataaatctacagtaatcaagacagtagtattagagaaaagatagatacaatgatcaatgcaatagaataaaagtctagaaacagatccacgcaaatatggacaaatgatttttcacaaagatgtgaagacaattcaacagaaaaaggacagtattgtcaacaaatggtggtgaaacaatttagcattcatatacaagaaaataaacgtctaactaaatctcacaccttattcaaaaactaactgaaaatgtatcatagatgtgaatgttaaatgtaaaactataaaacttttagaagaaaacagaaaaaaaatcttcatgacttttggttagatgaagagttcttagatacaacaccaaaaccataatccctaaaagaaaaaaaatgatatactggaattcattaaaattaaaattttgctctgagacagacactaagagatgaatagacaatctacagacttgaaaagaatgttttaaaatcacatacctgacaaagaacttgtatcccaaccgtataaagaactctcaaaattcagtagtaagaaaacatctaactgaagcaaaacatgggcaaaatatttgaatagacacctcaccaaagcgagtgtacagaaggaagaaataagcacatgggaagatattcaacatcatttgccattaggacaattcccactggaaaccagagcatttggattcagatgctttaccacattagaatttcacttatggaggaaatcattattatcaacaggtattgaaatattaaacttgcgccatcagaaaagttgttaacagagagtagaaacacaaattcaaaattggttactcaaagagggaagagaggctggtgctggcagcttcttttactctggagaataaagcccagaaggtctgatttggacccaagccaaaacacctgaaaaactaggattcggcatctaagcaagtgcactagtactagtcaaagagctcttccaacaaaaatcaattttattataaaattctgtcaccttctaaaaccaagttctcgggagatgtcttctagggtctcacaggataggtgacttgagctacacatacataggagcaaatagatgcagctatctgaaggaggcaaccaactgacaaatggagacccctataaactctgacacatcaattgcatggctgagaatccaggtatagaaagttggaaaaaagaaaaaagtagacgcaagagagcttgtgatttgtaaagacatttttgaatacagtctccattttctcagctatcttcctcaagaaagttagaagttttgggccgggcgcagtggctcacacgtgtaatcccagcactttgggaggctgaggcgggcagatcacgaggtcaggagatcgagaccatcctggctaacacggtgaaaccccgtccctactaaaaatacagaaagttagccgggcacggtggtgggcacctgtagtcccagctacttgggaggctgaggcaggagaatggtgtgaacccgggaggtggagcctgcagtgagcggagatcgaaccactgcactccagcctgggcaacagagcgagagtctgtctcaaaaaaaaaaaaaaaaagttagttttgtacctgtataaacctaccagtgtaggaatatgcatagtcataaaccccttagaaaaatgatacaaataattacctatcacaatatctggattgctatgtttttatacaatgctatgttttatgctaactttcaatagtgtagtaaagagtgaattctcaggaatcaggtagcctggaatggaatatcaactctatcacttcccaataatgtgaccttgacttttcttgggcaagtgacttgacttttcctcagtttcctccactgtaaaatggccataataatacttactacatggtttaatagttataaagcacttggaataactcctaataggtgctggctcaataaactacatcatcatcatcatcctcatgtcatcccaagacaaccgtgcttttatatttccaatagagacttttatgttgcccttagctgtgattaactcgctacacaggaacatgtcagctgagtgggaggcagaaatcacctgcagaaatagttcccctaccttgtaacttttaggaagagagagaaaaattgcttcacttacttaattgtaggataccctgaaaaccttcctaccaggaaaaatgaaagccttccttctttccatctttcttaagtgtgcatgaaattgattctatatgcttattaaatctgaaagagaaatttcatgatacaagcacttcctgcaattgaatggtctttgagaactcatattgactataattcatctggagagtggccacacagtttgacaagaaaccccggcctgtctgtgcaggctgctgaagtgtgtttctgcacctgcctcacacaagactgtctgtttcttttttaaggcaattaaaatatttgtaatacacatattgaagacacacactgcacctttgggtcttgagctgtgtggggtgtgggagaatgaaagagcatcagagggaaattgtgtgtaggggagagcccggtcttaattaagacacggacatgagaaaatatttactgaagaatgtggtgatgtggaggagcttggtagtcaggaaaagtattgttttgtgttttttatccccaaatggtagggtgaaaaggttttggggagagagagatgggagactggctcaggagggaggaagcacagagcaagtgaaaagaagtctacagatggccagagggtgtggtgggcatggctggactcaagagcctaagggttcccctggatggtgggacattcagactagctgtggccctggcatggggcagaagggcctcagcttacacaagatggatgggcctggggggtggggcagaaaatgcttttctcttacacccagggacacagacaaaagtgggagtgaagatatctgatgttcaagatgggagtaaagaagcaggggcaaaacctaaaagcaggaatccttgctggtcctttgcagtgcctagattgggctgtcgcccgcatttacttggaactgtgtgttggtctcctggcagctctctccatctgtccttgctccctccctctcactacccccagagggatcattcttgtgtgtgagacagatcacattacagaacccctccacccatcctcggtccctttgggcagcggctcctctgtcattcatgggtgctgaaccagtttctatgctccattcctcaggtggcaggtttttatactttttattttctgcacagtttctgtaaatttggaccctgaatctataataacaagttgaacagggctttcaacttcttataagagctgtttttttgttgttgtttttttttccatccaaggcatcacatggaaggcgagccctctcttcactttgctggaccagtgagccacagcctttatctggcagggccctcctagagactccacactttatggaggggtctagttctagcttccttgccttggcaatgaataaagctgtgccttctttccccagctcatgctaggatcccagggtcccggcccctaagctctgcattcggatctgagctttccagttactcttaccatttggatattaaatttcttcttttttcttttggcatctagtgatttcctttattttttatgagttcttctatgcatgtgaaattttttttatattctatgcattatttctaatgcttctactcaaggaagaacattcatatcggtaagtcaccacaagttccatggttcccaggcagatttttcaggattgcatttctgacacttcactccctgtgtttgtttatgtgtctgtctcccttcagaagttactctgaggttgacagcatagcttatctgggtttatatcctggtgcctaatacaccacatggaaggtgctaattaaatcatgggatgaatcaaagagagagagagggatagtttaacatgtgttaggctcaaagtggaacttttgttgttgctgttattttgttttttgagccacactattgaaagctattactgtttgtttaatatgagatagagtcagatcagtgaacacagttttgagaaacatacaactgatacctcatcatagtacttattaagggtagcggtttaagaactgcagaaagtcaaacataaatcctctaagaaccccactgttttaatttgtgtttgcaactgaagtcagccacacctccttgggctgatcttaaaataattctttactcaaaaagtcacagtatcctggcacttaacaataacataagagagccccagcccggagcgactgtttgttttgataggaacagaaacaactcttttttaatgaacataaagctctcgataggtttgggggttttattcagctgttttctgaatctctcaaagctcgtcttatgaaattttagcaagatctgacccgtcccctccctagcctggatgcctccctgaggttgctgttcaccaccactgagctcagacagacagacggacaaacagatgggccttgctgaccagggagcttcgatttcctctcatttgctttggatccctgcagcaaaagtgttctgtcccagagccttgtctgtgtaccagaaatgacacacaactctcaaagacgtggtgcttgtctgccaggacttgaattcagaggagataacaccagccaaggcacagcagggcctggagacccttgctctgtccactgaagtatggcagacatttaatcccttcttccaatgcaagaaggaataggcaggggcgggaaggtagaagagcaggtgtctgaaacccccagaggacctccgtggtgagtgggtcctgaaccagcatgccaggttgacacaaggccatgacctccacactcagtcctctctgggcaactctgaaatgcttgtttttcaccagagaagcctagcatgtcagctgggcagccagcgaagaaaagccagtgccgtctctggcagggaacttgaaaaggtacaaccaaaaccatctcctggtgtccagctggatcagatgcacctgtggagatctcgctgcactccagagcctggtctctccacaaaaccagaaagcagagagaaaagcagagaaagggagtgggttcctgtctggtagatttccataatgtggtgtctgacgataagtacacagggtgtgatgaaatagctctaccccgtatgtgtcaagtggtgtaagcacaaatgcctaaaactcagttcttcagagttaaatctggaattcagccagagtctctatggaaggtggagtccccccgactgccacttcaggcccctccgtgaagcgattcatcctggagcagtaaataagtgtctcctgctccctgccacaggccaaccaggagtgctggagggtagagcccactgcaggaaccagatctctggcgaaacaggaagcactgatttactcattcgatgcttgtgaatcaggcacctatgctgggggaggtacccccctaggctctggagaggaggtatgagtgaaggggtactgctcagggagccctgggtgtctctgtccatgcaccctaagccgttgggcttagactgtgaggcttatttgcacacaaattgctgctttcccgtggggtgcacagcacagccacctgtggtgaagagctctctcaacagcagcagggcaggcgtgctacccatctataggggccgactcagcaacagggctccctctacccagcatcctcacttccagatcctctgagaggccctgtggttgcttgtctaattgacggaggaccactaaccagagatgacaacactccagaagcaaaacagaaattcacttgcactgagcccattcaaatattgagacacacgcaaatgcaaaagtaaatgagaccacatgtgagccaaactctgagtacaattaagctaaaagctagagattaggttctaattcaggcttcactgattaaatatgagaatacagcaagtcacaagacctcactggtctcagtttcctcatctgtgaaatgcggatagggagaggagatggaggaaataatttctgcctagggttgctagataaaatacaggaaacccagttaaacttgaattttagatacatttgaatttttttgttttgttttgtttttgtttttgagacgggagtctcgctcttttcgcccaggctggagtgcagtggtgtaatctcagctcactgcaacctctgcctcctgggttcaagcgattctcctccctcagcctcctgagtagctgggattacaagtgcccaccaccatgcccagctaatttttgtacttttagtagagatggagtttcgccatgttggccaggctggtctcgaactcctgacctcagttgatctgcctgcctcggcctcccaaagtgctgggattacaggcgtgagccaccacacccggccgaataattttttaagtatgcctcatgccatttttgtgccatgcagtatttttacttgtgaaatctggtggccctgtgctgtcgacattcacctgccacgaggtagacgatgtgggcgtcatctttgtaaactgtgatataacattgtctggtactctgggcgagtctcttccatttgcttgccagctcctggaggcagggctgtgtattaccaaactgtaactccatagtttccacataaggtaagtgagctaggtatcatgattaaatgacatttaggtattctttttggcagatcagctgatgggaaaggtggctaaagaggatattgcaaagaacccacagcaactgcagcctgactgttgctctgggctgctgtctgctgacaacagaagtgaatggcagaacctgggcaccaccacccaactgggcggagaaggaagccgtatagcagtgaaattgagtctgaaaggggtcggagcagagagagggagaacattcctggtagtgagttagtggctaagtgacaatgttactacatcacggatgcacattttccccagattataaaaataatttatgcgcatttgaaaactggaaaaaatgcagaaaatattaagaaaattgaatccataaccttgcaacccagagctaaccacaattaatatttaattctatacttatagcatttttgttaagatacatacatatatcttaaatataggtctatgaattcagaaaataaagtccatactatacttttttcttttttttcttgagacggagtctcgctctgtcaccaggctagagtgcagtggcgcgatttcagctcactgcgacctccgcctcccaggttcacgccattctcctgcctcagcctcccgagtagctgagactacaggtgcgcgccaccacgctcggctaatttttgtatttttagtaaaggcagggtttcaccatgttggccaaaattgtctcgatctcttgacctcatgatccacccgcctcggcctcccaaagtactgggattacagacatgagccactgcgcctggcctatactttatatataatttagctctttcaaattaacactttattgtgagcattactctatgtcctttaaattctttgagtgcataattctaatagtttcctattatcagtttctagatgggccctaatctattaaaccaagccctaaacattggaaattcaagctgtttttactgtcttcccattgtaaataaaactgttataatcggccgggcgtggtggctcacgcctgtaatcccagcactttgggaggccgaggcaggcggatcacgaggtcaggagatcgagaccatcctggctaacacagtgaaaccccgtctctactaaaaaaatacaaaaaattagccgggcgtggtggcgggcgcctgtagtcccagctacttgggaggctgaggcaggagaatggcgtgaacccgggaggtggagcttgcagtgagccgagatcgtgccactgcactccagcctgggcgacagagcgagactccatctcaaaaagaagaaaaaagaaaaaagaaaactgttataataattaaattgtacacacctatatacacatcccaaattatttcctcaaggcactgcagtggaattactggatcaaagattatgcacatgagattttcatttatttttatgggtacatagtaagtgtatatatttgtgggttacaggagatactttgatacaggcatgtaatgcataataattacatcatggtaaatggggtatcacctcaagcatttatcttttgtattacaaacaatccaattatataatcttttagttatttttaaaggtatcgttaaattgttattgactatagtcatcctgttgcgctatcaaatactaggttttattctttctaactacattttttactcattaaccatccccacttcctcccaccctgccactgccctccccagccttcagtaaccaccctgctattctctatcttcatgagttcaattgttttcatttttagttcccacaatgagtgagaacatgaaaagtttgtctttctgtgcctggcttatttcacttgatataatgacttccatttctacccatgtggttgcaaatgacgggatctcattcttctttatgactgaatagtactccactgtgtatgagtaccataatctctttatctattcatctgttgatggacacgggttgcttgcagatcttggctactgtgaacagtgttgcaataaacatgggaatgtagaaattcctttgataaactgatctcctttctttggggtatatacccagcagtgggattgctggatcatgtagtagctctatttttagttttttgaggaacgtccaaactgctcttcaaagtggttaagatttttgtttaagtattaacatttactgagcacttactctatccctttcactattttaaatatttaacattattatgttaatgacttaattattaattacttaactactaattattagttagttattatcttcatctcctgctcccagccccatctcacagatgaggaaactgaggcttagtgaggtcttgtgacttgctgaattctcatacctaattagtggagcctgaatttgaacctaacctctagcttttagcctaattgcattcagagcctatctcatttggggcctcatttacttttgtatttacatgtgtttaatattttaatgagttgaaatttcatgttgctttttgttttgttttgcttctggagtggggtcacctctggttaatgatctctgtgaattagacaagcaagcacaggagttctcagagcatctggaagtgaggatgctgggtcagagggagccctgtgactgactggattcttgtattaaaggtcactactattgttttcctcgtagtagagaggagaaaattgcagcacagaaaaattaagtaataaagtttcaccctcagaaaataaaaaggagggaccaacccagtcaaactccagtgaagctgtctaattacccttgactgtggctttacccactttcccactgttgctttacccacggatagtttatgaatgctcatctcatactctgagaaatacaggtgaaatattttatctttacctttggtatattgacaacataggttgtttcatttgtatttttaataactatagagattgaattttttcatattaaaactttgcttttttgtaaactggcaatttttggttagcagtgattgccctttactctttggtatgtgtgtataaatatatataaatagcatataaatacacacgcatgcttacatacatacatactttctatagtgagaacagtaacgctttggctatcataaatattctgttattcccaatgtgtccttggcatttaattctatagtggttttgatgtctttcatttttctacacctaaactaattttttaattgtctgttactttaaagagttttacttaagacttgcttctgtctttaatactcatattttcttttagcctgtcataattgtagtaattttttcattcaaatatttgatccatctggggtttattttgtaagcgtaatttttgtcattataacatacataactggtttttagaactaaccaattttctcagtaatatttactaatgaattcatcatttctccaattatttaaaaagtttcttctgtcatatatgttttggttgccacttctttcattcctttatctgtcttagacactatcgtattgttctgattattgcaattttataaacatgttagcagtgtctctacagaacccttcttttaaatcctgcaattatccatcttcattcctctatgtttttgaatactcctcaaaatcactttttcaagttaccaaataacatcattaggaaattgattgggaaatatcttaaacttacatcttatttaggaaagaattacatttataactaatgtctttccttctagaaataaaatttatttcacttttgtgccatttttaatatatcttgataatatattggagcattttttacacagatcctgatttttaagcttgttcctagttattatgtatattttcttgaataaaatctctttaaaaatgttctttggtttttgaaatgtctaaaagagttattgtggcttttggtgtggtggctggtgcttgtttactttgtttttagccagctttctgtgtaactcactagtctgaatatatttttactgcctatcttgattttccaagggaaaaaaatgaaaaaaaaaatcatatatcacctgaaaatgacaactttgtcttttcgccattgacccctaacaagaggggtctcttgttagagtagtttgttttattgcgttgactggaacttccaagaaatgttgcataattgtagtgatggaagatatgtatctgacacttctgtgaaacagttctcttcactggtttaaaataaatagattttttatctcatgtcaagaattacctttttcccaattttctaatattaatatttgatttttatctaatacatttttattatggtgattatataatatttttctctggcctatttatgttatatattttaataacagctctcctaattttctttctttagaaaaaatgcaacttggccatgggacatgatgtttttgacatgatatcagattcagcttctttctatcttctttctgattatacaaatgggaagatagtttgtgttttccttctcttgtgctagtgttgtcattttagagccagaattaggatagcttcataaaaccaatgaggaagctttggatcttctatcctctcagttttatagagcagaagaatgatttgttcttccaacttggaaaaacgttcataaaaacatttgagccagagccatttttggaggtaagcctttgacaacactttcaatgtcttccctagttattttttctattcaggtttactgctccatcctgagtcaattttggtcatttgtattttcctagaaaatcatcccttccattgagatgttcaggtttattagcacagggcggcatgcagtattctctcgcagtacttttacactcttatcaatagcatcattctcttgtaactaatttcgtatatttgtgttttctttttttatttttagtcagacttgtaaagtttgcttatactattggttcagatatgatactacaaaggtccagatctcagattttttaaataaattttaagatttccttctttgccaatgagtttctgctgctttcttcattttctctttcctgctttcctaaagcacttattatgccattctttcctcatatcttagttaaatagttatttaatattcatcttttcttattgataataagatatttaaaactgtgcaattgcccgtgagtacaactgtggcaacattgcatagtttttcataagcagccttctcatcaatattttcaaagtgattctgaattacagtttttcttctcatagatacaaaagctatttatttaggacatcgtctttattttatgaggttgggtttgttttatttaaactggcatcagtaatttatatatatttttaccacagtatgtttagatcctgctattataaaatttctgctttgggaaatagaaggtttattttgtaaataaatatgtgatcagtttatattaatgtttaatgtgtatttttaaataaaatgaattccatttttagggctcaagtctgtactaccaatgtctattatagtactttcattagctttcttacttaaattcattataatcttcattatttgtgactttttgtatcttttaaaaaccaagagtggtaaattattttattgggattctattcatttctccttgtatttttaattggtgttctttgtgtactttgaggtaatgttgtttagttatgtgtatgagttatatctgcatagtgaagtgtgccttttgaaatatgactcccttttttaaagtaacattttgtgtcttgcattttgatccagtataaatatttgcacccatctttctttgagtgtttatgagtaaggctttaactatcaatgttacttttaactttcctgagtcattttgattaagatgtgttttctttaaagaaaaataatattaatatgtgcttctaatagttgtttcaaagattaaatataataatacaattaaaacaaatagtgtagtatttgacatatagaaaatgctcaatgaataccaactaataattgcgtgaaaagcatgcattcaattttttttttttttttgagatggagtcttgttctgtgacccaagctggagtacagtggagcaatctcagctcactgcaacctccacctcccgggttcaagtgattctcctgcctcagcctcccgagtagctgggattacaggtgcccaccaccatgcctgtctaattttttgtatttttagtagagatggggtttcaccatgttggccaggctagactcgaactcctgacctcaggtgatctgcccacctcggcctcccaaagtgctgggattacaggcatggcattgaatttttaaagcaaaattgaaatttaagaattataattcaagactatagtctttattgttacatattttattttaggcattcttcttgacatctgctctcatcctttctagttttcatttgcttttcctggttctttcttgttaagtctactttacttcctcaggccctgtgctaaatgtgatggatgctgcagtgagcaaacctcagggcttacattgtagaaggaaaggcagactcaagtcaaatcatcactcaaacaatcatgtgaaattacaaccatgatacatgctttgggatacatgagagtagacttgcaactgtcaccttagattcatataacatttacaaagcacttttcatacattatgtcctgtgagataaattacagccatagaagatgtatcccttgaccctacatgattaaagggtagatggttaattctttcaaaacacacatttcttgtaccaaatgtcatgtaccactcactctcagaatctgtcattctgagaatacagagaaattttgcccactaatgggattcaacattttcatgggagaaaggcaatagaacattccatttcttaggtaaaacaaccaagaatgcgggctgcaactctaccactttgggggtggggggtggaactaccgagcgattagatgttcaataaatatgtattacctgtcttctattgactaagaactgtgctaagctgtgtagatacaatgaaaataagacatagttcctgtctcatggaccaagctacctatatgagaagttccatagtgaggaccatggaacacagaagactcagaaattggacagtagttggggacaattgtagccctctccatatattgaaatacagaaaagctatatcttttccgcagtcagaactgtgtaaagatggaatgagttttctgatgagaaaatatgtttttctcccaccggtgtgtggactttcaacttctttatctcctattatgtcaatgctagatgtcccatatgcgtgactttttaaagtgtttattataggaattttcaaatattcagaggggtgctaaaaataatatcataattatccatgtacccaatctccaacatcattaagcgataacatttatccaaatctgctttagatctctaattaagaagcaaaattttaaagatgaagttgaaacctcatttgtcaccctactgatcccattcttcttcctgcctcagagtttgtgtggccctaaagttgatgtcactctttttcatccatgttcttgtatatttactgcatcaatacatctgaattttttttttccagaaactttaaccccaaaccaccttcttgctcaaaacccttcagtggctcccaactgtctacaccaatgatccgcaaatcaagttatcttctgaatcttctcgggagtttcaaaattatatagattcttgggttgtccttggggactttgcaaattttcagggtttctcaactttcatcctgttgagactaggggctacataattcctcatggcagggcttgttctatgtctggtgggatgtttagcagtgtcctggccttcactcattaggggtctgtagctcccccactagttgtaagaaccaaaaatatccccagaaactgtggtattagccctgccttttattttctgtattctgaggctttgagacctagagcctggctcaccctgaaaggctgctcttcccagagttagccagttcctaggtataataaatatgattttcaaatacaaaccaatccatctggagcccacacaccaaccacctcctctattgggctttcacactgcaggccactctccacctgacctaataacctcagggccaggaccagacaactagggacagccccatgccccagagccactgaaattatccaaactagccaatcatgaatctgcttactcgcctcacctgttccttgttgcaggaaccccaagaaagcttttggcccacagtccgcactcccctgactcctgatcgattgaggtgtttccacacttggccctgtgtggtgtggcctgccttcactgtcagcaacaactttgttgtcactggcagctgccttctgatcttttggccttattacatctcaaattttcttcaatccccggtattttattttatcttatcttattttattttttgagacagagtctcgctctgtcgccaggctggagtgcagtggtgcaatctcagctcactgcaacctctgcctcctgggttcaagtgactctcgtgcctcagcctcctgagtagctgggagtacaggtgtgcaccaccacgcccagctaatttttgtatttttagtagagatggggtttcaccatgttgaccgggatggtctcgatctcctgaccttgtgatccacccacctcagcctcccagagtgctaggattacaggcgtgagccacctcgcctggccaatccactatgttttaaagcaattgccaactgtcttgctccagattgagaatgactaggttaatctgaaacctggaaatctgtatcttaaaaaaaaattatctaagtgatgtgagatcattggatttggggaccacgaacctttagactctaggcacaagagttgagcctggccttcatggcctctgacgatctagccccatcacacgtgtgttccttctcctctcttgccactcatgttgctgccttgccccttcgtctgcaaaactgatccttgaggatgtgctgatccctctcactttcaaacctttgctctaaatgcagactccggcttttccaatgacctcttagacttctaatctcacgggcatttttaaaaataatacgtttgtttactaaaggaattaactcaccccttcattgtgacacatctgaaacagttaaaacgctactctcatgccttaaagctttacaaaccctcatacaaatatgaggcagtaattacaagtttacactctcataacacaggctaaggcccttctctcagtttaattttgtatctgttgctatggttatttgattcccgtctctctcccacactagactaaagatttcccaaggtcaaagatcaagtctatttttgctcatatccacattactttacaaagtgtctggcaataaacatttggtgcacaaatgaattaattgattaattacccgactaattaattactatcttatgttgtcttttcaactggatttcaaacgcttgaggattatttcgcttccaagtttcctttcaaccctataaacatagttatgtttaaacggtacatattgaaacaataaatgattactattatctgaactacatagtgttatcagtagtactttactgagcctaccgacagaagccaagtactcattcgatttatgtttttaaatgagcagaatccctttgaacaaaaaacaactgcatttgcaaagaaatatgatgttatttatgaccattatgtcatcgcctattcagaaaggacagatttaaactgagtattagtgcctaaaaccaaaaagtatcctcccgtttgatgaatgtcattattgtcaggataattccaaaaattgaattgaactagcagaaagtgttttctgacattttttatttctgtttcatacacagagatgccttgtaacctgaggaaaacaaagtttgtttttccatattggtgttttccctcctcggtgtcttcatttcttacttacagagaagaatgctaggattttctttttctttttctttttctttttttcttcagagtgatacatgtgtgtgcttaggaaacactgacttgacagtttactgtgagaacgtggaattcccagcctcagccccaacccctgggcaggtggggtctagaagctctgtgtagacagttacaccccgggccatggtggggaggggatggccttccgagggttgaagagcaggagcagtgaatggcttattcccaaaagacttctctctgtcctttctgccttcatcattttaacacaatgaaaacctaattgctccccaaattttagatttagtttgtacctacagagcttggaacactgaaaataaaatactgaattacagacagcctgcaggcattctagaacagtctgtctacctctctcaaagaataactatgaagcagctcctcagggtccagggaatttgtccaccatcgtttatataataactgccagtgcagagatcctgaaaaaaagtctctgttctttctatgatgtacgaacttccttaagaaaataaacctgtacttcaaaatttatattccaaggcttgaaaacaaaagcacattgccgtttctcaaagcaagaaaagatttgttctaagtggctccagaagtgattgctgttcaaagagccgagataagaacccacaaccacttcacatcatcagcagacaggagcagttcacgccagacagcaggaatcagctcaaatccactctctgtccttgctgactctttctgtctggctcccagtcccaccccaacctccgtccctgcctgtatcccacggtctcttcctcttctctcactgacatctccccactttcttacctagtatctgactctccctcccttcctttctttcagctgttcccgccctctctcctcttttctgtgccccataacaattcttttctctcctttcttccttcctaccttagaactgtctgcatcactgtttaaggtttggatctgccattgatctctataaaattagatacactaaaaatagatgtacagaggcgccttgaagccaaagtggagaaatctaagaactctttctctttcactatatttgagccttctttatcattaataatggccacttagaacaccttagaatggatgtaccttattttgggaagttttctgagagtgggatttcccaccctctaggaattcaagatgcaaacactcaccctcctgttggtctctaataagcccaccatgcatttgctacaatgggaattggtttctctagagaatacatgagacaaacaggactctcaatgagtccaacagaagtgacagcccaagtgatagggacacaaggcagggaaattctgggcagaagtgggccagtctctggcgagggccccaccctcaagcctggaagtgtggcccaaagtgagaacttacattcctgttttcctgctcgaatgtttcctttcccaagaccacctgtgcccctccccacccccatcctgtgtcaataaaaaaccccaggctcagccagcacagataggagaagcagttggacatcagagactacttttggatgttggagagaggtggcttgacttcagagggacagcttgatggtatagcttcagagaggagtctggccagggacagctggatttcaggggaagattaccttcccactccatccccttttcagctccccttcccaccgagagccactgtcatcaacaataaaatttcctgcatttactaccttcaatttgttcttgtgacctcattccttctggagcctggacaagaactcggtgccacaagtgtgggtgcaaaaggctgtcacactgaccctccactgagctgttaatacttaagctgtctgcagacaacaaagctaaaagggtacgctaacactttttctcgggctttgggggttgtgggcaccctcccctagatgctggcatggggccattatggagttcgttcttgccagcacccaaaagtgcttaccctggctcctgcacctgatcacccgtgctccccctcctgcaaggagtgaagcagtgagtgagtggagtttgtccctgctggcacccatgcactccagtttccacccaagaatggggtctgggaaatatcctgcttcacaagcaccaagtttggtttgaaaaaccactaagttaaatggaagaagagggagtagaaagagcaggaaataggggttcaaggctaggccttcccagccaagagagagcgagccacagcacccagacacttcattgacagaagccctctcctcccagggctcttagattccctcccccaatctggccccaagtatacctctgccagccccttggaactctgcattggtgatccagtctgaaatttactgtgcagctcgaagctgaacaagctgatgaccacagcttcttccttgtccttcttccctgtccttgcccagcccaagtcatagcagttcacggatattttgaacaggacgagagcttcagcgtcttcacctgcctttatcactttacatccagagatcagcttatgaaagcctcataaatgaacatatgtataagcccattttgatgacagatcacttttaaacaacactttgattgagatataattgaaacatgataaactgtccatatttaaagtatactattggataagttttgacgtgggtatatactgtaaaaccatcacaaaatgtatcttatacaattaagataataaatgtatccatcacccataaagttggtttttctgtttgttttgggcttttttaatagactttatttttagggcagttgtaagttcacaacaaaattgagaggcaaatacaaatttctcttacatcatcgtgtccacacatgcacagcctgaccccttgtcgtcattctccgctggaatggcacattagttaccgctgatgaacctactttggcacatccctatcacccaggtccatagtttaattagggttcactcttgctgtcacacattctatgactttgggcaaatggcatacaccagtatagtatcatgcagaatagttttctgccctaaaagtcctctgtgcaaatgaataggataagtggagcacagatcactttttagtaaaatgttgcctggttttgatttgacaaagtaggcaacactgtcaatcactggagaggatgtaaaaatagaaaaaagatgacctgaatccaaatctctttttcattctgaagttcattgttgattccttagcctccccctttctttcttactctatttataaagtttttactttctaatacagcctgtcaatattttaaatttttttcattagcagcacactgcatagtgtggggaaaatatcattatttcaaagctaattgtacatataatccatttttacatacatgtagaccataagacagttcaaatattttggggtagtttgagctcaatctgatttcaggcattcgaaaccctgataacccagcagaaagttaatgctgggttataggatttggagtgcctgaaccatgccactgccctccccctccatcaatttgccccctcactggttctctttcagttcctgtacatgtcacgtattctcctccctcaaggcctatgcattttttcctttcagtttctaatgatgttcttccatgtcctttacctagatatcctcttcttaccttttatgtctcaaataaaatgtaacatctttcttgtgcaacacccttaactaaacttcctccctgttgttctatctcataccccttgtcctttccctctagaattgcaccatccagtaagtagtcactacctgcacgtgtgtgtttaaatgtaaattaattaaataacatttgaaattcagtttctcagcacattgcctgcatctaaagtgctcaataatcatatgcaattagtggctaccatattggacatgtaggtacagaagatttccattctcacagaagtttgcactggagagtagtccatctagatcatttagtatagttcctaattttacataaattttgtgagatgtttttgttcggtcggttgatgcttacctgcttctggactgtatattttatgcgtgcaagaattacaaaatattgatcagggctctggcactgaaagggtgttccatacatattttgggcatgaaagaatgtcatgaatcaagtccaaagccagtaagttgcaagaatacacaagagaggaaacaaatgtgcagatgggaggcaatgaccctcatatttccagctcctgttagcaaaaaccacgaaagtatacagagggggataaaaaggataccaggctgtccaattaacaatggagtaaaaccatgttttcccactctccttcctaaaatcaattaaaggcaacaagaagaatgaaaaaacgtagaagagaaagcctcgtgaaactgagaagcatctgcaaccacaaactacaaaatgtagctgctaaacaaaatgaaagttggatcaaagtggtggcaaatatcaagagtgaatatactccacggcagagtactgcaaatgtaagttccatcaccttaaaaaggccagccaatggctccttgctggaatgtctggatgtggggactgcttgggcactagaaacatctccaagtcccattccatgttatctagtgacagggagagctggcgctggatgataaattacacagacacagtatctttgtgaaaagccagtgctctgtatggcaaggtagagaggtggcagtcaccatctgctgaaatgcgatacacactaaatcccgttccgtaagtatgactacctgttacacacaggcgaactatgtagtcattcttagcggagaaagggggaggaaattgagctcttagcagaaacccactccaaagttcgaggaagagtgccttgtcccctgtaaaatgtcctcctgtactactcctcctccaattttttagcaaatgcttgacccaggaaaaaattgctcccatttagagataagtaataatcagaaaagagccagcctgagaaatatgcatggatataactggctggaagaaaggaacatgccaaacaaagccagatggaggctagacctcagaagaattactctgcaagcagaacaacagtacacacaaacatttatccagagtcaaagaactgatcatggtgcctgggaaatcagagctcagaaaagagatatagggatcaaagaagatatgataaggcaatacaaagaaataaatgtgagctgagagagatctggcgaaaatgcagaagagaaaaataatttaaagctaaagccatgctgaaattaaaataaatattgctgagaaagggaaacatggaggacaggctgagttagaaagaaatgaacaaaatatgtggaaaagccaaagagttacagagaaaataagacatagtgaataaatatgcatgtaatttgtgaacgcctccccaaaggaaactgaacaaatgtggcagaaataaaatatccaaacatatgagagaagacattttataaaacaaaggtagatacatgtcttatgattgaaagatcacactgtgtcccaagaaaaactgatcaaccaaaacatagccattaaattttttggtttccatgattacgtatcctataacatccagcaactcctctgtatagtctccccagcctctcaataaataaataaccaagcaaaataatcacatatatttttcaaactacctatggggcaaaagaaagaatcaaactaggttcaaagttctctatagcaatgtctacaactcctcagttaaggaatgggaccaaatgttttacagcaagacggacatatttaaatatgcaggaacaaaataaacataacatccttaagttcttgtgggaagaaaacaaagtatctgataacttaattgagattttcaagaggcaaatgaaaagacatgataaaagattgaaaatgtttgttaaaccaacttaaacaaagaattttgaaaactatagccacagaaaacaatgtaaatttttattaatgctgaaaaagtagaaaacataatgaaattttctatttggagggtaatcttttccttaaaaaatccttgtaggccgggtccggtggctcacacctgtaatcccagcactttgggaggccgaggcaggtggatcacctgaggtcgggagttcaagaccagtctgaccaatatggagaaaccccatctctactgaaaatataaaattagctgggcatggtgctgcatgcctgtaatcccagctactcgggagactgaggcaggggaattgcttgaacctgggaggtggaggttatggtgagctgagatagcatcattgcactgtagcctgggtaacaagagtgaaactccatctgaaaaaaaaaaaaattccttgtaaggtgaattatcaaaataaaaacataattataattgtacttcattcagttacaaataaaacatatctactcaatgtttgagtaattgaatctttaatttaaataaaaataaggcccggcacagtggttcatgcctataatcatagtgctttgggaggcgggaggatcgcttgagcccttggcattcacggctgcagtgagctgtgattgcattactgaactctagcctgggtgatggaggtgcgagatcctgtttctaaaaacatgaaaatagttaaaaattaaaaataaatagtaggcagggcgtggtggctcacacctgtaatcccagcactttgggaggctgaggcaggcggatcacgaggtcaggagatcgagaccatcctggctaacatggtgaaaccccgtctctactaaaaatacaaaaaattagccaggcatggtggcgggtggccgagtagtcccagctactcgggaggctgagacaggagaatggcgtgaacccgggaggcagagcttgtggtgagccgagatcgcaccactgcactccagcctgggcgacagagcgagactctgtctctaaataaataaataaataaatagtaaatgaccctcaaaatcagtacaaacaatgcaaataattcacaggatcatcaccactacaaactagcaaatcatggacctgccagggcttactaaaacctgtgcaaactatactactgagaacgtggctgcatagtggcgctcactatggctgagttgctcttaaatgtgcttgccaggagatgtctcataatctgaatttctcacatatcataattcccatgagtctcacgggaccatcttaggccataactttaacaaaatcagatagacgtgggcaggagagaagctaaagaaagtatcctttctttgatttccttacctttcatagaaaccatcaacagctactgtctgaagatgataaaaataaagatatatgcgtatggttagacaattgtatgaacatatgtatcagatggaaaacacacacagcaaaacaaatacccatcacaaaagaagaaaacaaaggaagtatatataatgaagtcattcaaaataaacatcaacgtgactccccgagtgacctccctaaataaatagcactccttcccataaccatgcttcttattcctattttcctactttattttttttccacagcgcttatcaccaccactgcatatttatttgttgttattatcataattttttgcctctcctaactagaaatcaattctacgaaggcagaaattctatttggttcactgctgtatcccagcatctaacatcgtacttagtatactgtcaatgctcaataaatacttttttaaagaaatgtatgagtaaaaacagagaacatgatacaaaaggaaactacagaaacgaagccaaacaaagataacataacaataaatgtgaataaaataaattcagctatccaaaggagaataatcagagtatgggtcaaaaacattaaccaaataaaatatactggttaaaatatgtaagctctgaagtaaaaatgcaaatttgatttccaaatcaaggtcttatcaatcctcttttaagatgacattctgaggctataggcagatcatctatgtaaagtaagacacacaagagtgcccagtacatggtgcacagtcagtaactattagtgggcaatggtaaaagcagaagtgagcttggttgtaatattggtgacagcagtggtaactcaaaccaaatgactttgtaagactgcaatgaaaagaatcagtgtcaatcagaatggctattattaaaaagtaaaaagaaaaaaaatgctggccaagttgcagagaaaaaggaacacttatacactggtggtgcgagtgtaaatcagttcaaccattgtggaaacaagacagtgttgtgattcctcaaagatctaaaaacagaaacaccattcaacccagcaattccattactgggtatatacccaaaggaatgtaaatgattctatcataaagacacatgcacgtgtatgttcattgcagcacgattcacaatagcaaagacatagaatcaacctaaatgcctattgatggtagactggataaagaaaatgtggtacatatacacagtggaatactatgaagccatgaaaaagaatgaggtcatatcattggcaggaacaagggtggagctggaggccattatccttagcaaactaacgttggaacagaaaaccaagtaccgcatgttctcacttataagtgggcgctgaatgatgaaaaacatggatacatagaggggaacagcatacactggggcctacacaagggtggaggaagggaggagggagaggagcaggaaaaataactaatgggtactaggtttaatactgagtgatgaaataatctatacaacaaatgtccatgatacaagtttacctatgtaacaaacctgcacatgtacccctgaactcaaaataaaagttaaataaagaaaggaaaagaatcagttatcatgacagtataaaagagtgagtctgttgtggtctggagactgtgagaaatattctccaaggaaattatatttaagctgagacctaaggatagatgggaactagtgggtggagaaaatggaaaacgaaatttgtgtatgtggtagggaaggagaggaatagcattctaggcatcagcaacagcacatgtgagcggaatacattgcagagaagtgccaaataccccagccttgggaaaaagtctcatccccgtaacacacactttagttaacagatactgcaatgggaatttttgttgttaatttattcaattgacttaacaaatacttacgtaagctcttatgtgccaggcactctaaatcagttgctgggaatagtaccaaggtatgcagagccccttggcctcacggagcttccagtgggaaatttttaaaaatagatgaaaagtaccctgggttttactatgaaaaatagcagagtgccacagaagcatatagcaggtaaacctaatctaattctggggtccaaaaattatcctagaaagcgtaacttttaggagaccactcaaaagaaaattaattgctcttaaggcgagtgaggaggaatgaacaaaacgttcgtgaaggtaccgaggtaaaagaaagtgtagcagttgagcatttgaaagaaatgcattatgtctgaaacaaagagaagcagagagagagagagaggagagcaaaagagtgtgagagagagaggtgcaagcagagagaagctggagagagagacaaggcatgatagcctgcattaaggattgtatttccggttgggcgcagtggctcatgcttgtaatcccagcactttgggaggctgaggcgggcagatcacgaggccagaagttcgagatcagtctgacaaacatggtgaaaccccatctgtactaaaaatataaaattagccaggcgtggtggcaggcacctgtaatcccagctactcgggaggctgaggcagaattgcttgaaccgggaggcagaggttgcagtgagccgagattgtgccactgcactccagcctggcgacacagcaagactccgtctcaaaaaaaaaaagaaagaaaaacaattgtatttcctaagtccataagaaatcattgaacacggattgactaatccatttttcatataatttgaaagattgttctggttattgtgtggaaattgtttggagcagccgaacatggaagctgcggaggccacatgtatttgtcagtgtaagttttgttgtcctatggtaataaatatcccccaaatctcagtggctcacacaataaaaatgtttttctcactcaggctgcacatctttcatggattctggtccacctcgtcctcacgcggggatgcagactgacaagcttccaccatgaagggttgtcatttgccatagcagggagaggaaaatggagcaaatcagtcaccagctcgtcatacagaagagtgtcccacgtcatatctgctgatatgttatggccaaagtacatgactatctccaaggagctgagaggtgaaattcggacatttgtctggacggagtagaaccaagagagtcgtaaacatcctgtggactacacaccgtttaacaagatgcaacagtattctgggtaagagatcatggagaggcatttatgaaagcatttttaaatcaaatacaattattacaatttgtcgattaattggatgtgagaatggagggagatggaagagtcagggatcatttccctgtgatggaaaggacaactggataaatgctgtaaagtgtcctgagttagagaatgtagaagatattttggagtgggagggaacattcaaacagagatgtctagtacatagctggaaatgagatcagaagagaggtctgggccgaataaataaattttagagcgtttgacatccaaaaggtacttgaaatcaatggaacaaagatttgtatgggagggtaagcaaatcattcttctttgagactttctcgattttggcactgaaagtcgtatgtcatgggaacattctcaggcttgaacaaactgcagtagttggtcaccctttgagagtgtgtgaataaaaagaacaccaagacagatttgtgaggagaaaacacgtactggtcaggttgaacaagaggggctgtcaaatgatactgagaaaaatagtcatgaagatagaaggcaagtcagaggaatatcagagacccagaaagcaaggaaacagtttcaagaaggagagagtgaggggccaacggggccaaatggtactccaacattaggtaggactcagattgcaaatgcccattgctgagggaccggaaaacagctgaaataggactcccagttgtttacgcagccaagcagagatcaggcagggaggggatggcttgtccaaacacaagaggctgacacatcaggaaggggtctgagcttgtcctgggtgtagtgaccagatacagtagatagcatggcagcttctcacatagcagaaaacaaatgatgcagatctaggttcttgacctacagttcactgcacacctcctcaggctgctggactgcagaattcaaaaggaattcatttaacacataagagaaatcaaaaaggatactcgccaattatatgaatgcaagacacggataaaactctcctttaaaggtgaatagagagaaaatagccagctggggcctgtggaacgactctgaaacataaatgaagataaactataagaaacataaagaaaattttaataaacatgatttttttctcagtataattcaagaaagcatgaatcagttattggggtttttcctatagagttgtagaaattccttacatattttggctattaactccttattagatatatggtctgcaaatattttcttccattccacaggttgccttttcattctgttgattgttttcttagctgtacagaagctttttagttaatataattccacttatctatttttgcttttttttttttttttttgcctgtgctctcttggtgtcttatagaagaaattattgcccaggccaacatctagaagcttttcccccatgttttattttaatattttatttatcatgtcttacatttaagtctttaatccattttagtggatttttatatgtgtcatgagatagtgctctgatttcattcttttccatgtgaatatctcattttcccaacacaatatattaaagagattcttttttccatagtatattcttggcacccttggtaaatataagttgaccatatatgcctgggttccgttctgggttctgtattctatcccatttgtctatatatctgttttgatgtcagtaccacactgttttgattactgcaggctttgagggtctttagtgtttccaaatgaataataggattttttttctatttctgcaaaaatgccattgggattttgttggagattgcattgaatctattgattgatttgggaagtaagaacattttcttttcttaattttttaagctatctcctacaggaaggaagaacattttaacaatattaattcctccaatcaatgaacatgaaaaatatttccatttgcgtcttaaaaaaattttgttcatgttttgtagtttcgagtgtacaagtctttcactgtcttggttaagtttattcctaagtgttttgggttttttgatgcgtttgtaaatggagttgtttcttaatttctttttcagtctgtataaatgaaactaattttttgtatgttgattttatattcttccacttcactgaatatgtctataagttaacaatttctctctctctctctgtgtgtgtgtgtgtgtgtgtgtgtactttagggtgtatatatatatatatatatgactatgtcatctgcaaacagaaatcattttacttctgcctttccagtttggatgacttttattttttttttcttggctaattcgctggtaaagacttctagtactatgtaattgaacggaagtggcaagagtggttatcctggccttgttccagatcttagagtgaaagacattagctttttacccttgaatatgctgtcctggccttgttccagatcttagagtgaaagacattagctttttacccttgaatatgctgtcagctgtgagcttgtcatatgtggcctttcttgtgcgcaggtaagttcctcctatatgtaacttattaagagtttttatcacgaagtgttcaattgtgtcaaatacttttttctgcgtctattgagatgatcatgcgatttttatccttcgttctgttaacgtggtatatcacattgatttatttgcataagtagagccatttttacatccatgggataaatcttacttggttgtgatgtataatttttttaatgtgctgttatattcaatttgattgtattctgttgaggggttttgtgtctgttatcagggatattggcctatagtttgtttgtttgtttgttttttcttgaggtgccttcatctagctttgatatcagagtaatgctggcttcctagaataactttaaaagtgttcccttttcttctatttttggaatagtttaagaagcaatagtattaattcttctttctttctttggtaaaattcacctgcaaagcttactgcaaagcttactggtcttggacttttctttgttgacagtttattatcattattattattccttcaatctccttgttattttgttttgttttgttttttgagatggagtctcgctctgtcgcccaggctggagtgcagtggcgcaatctcggctcactgcaagctccgcctcccgggttcacaccattctcctgcctcagcctcccaagtcactgggactacaggcgcccgccaccatgctcggctaattttttgtatttttagtagagatggggtttcaccgttttagccgggatggtctcgatctcctgacctcgtgatccgcccgcctcggcctcccaaagtgctgggattacaagcgtgagccaccacgcccggcgaatctccttgttttttattggactgtttaggttttctatttgttctttattcactcttggaaaagtgtatgtttctaggaatttctccgtttcttttcggttgtccaattggttagcatataattttgtataatggtttcttatgattcttttctatgaaatcttttgtaatgtttcctctttcgtttctgatattttaagtctttttttctttagtcaatctagttaaaattttattagttttatttattttttcaaaataccagctcatagttttgtcagttttttaaaaatgttttctattttctatttcatttatttctgctctgatctttatttacttatttatttatttttgctaattttgtatttagtttgttcttatattctggttcttcagatataattaggttacttacttgggatctttctttgttataatgtaggtgtttattgctggaaacttccctcttagaactgtttttgttgcatctcataagttttgttttgttgtgttctcatttttgttgtctcaaaatattttctaattttcttttgacttcttttttgacccaatagttgtttgagagtgtgttgtttaattttcatgtatttgtaaatttttctgtttttattctatttttttatttctcgtttcattccattgtgattggaaaagagacttgaaataatttcaatcttaaattcttaagacttgttttgtagcctagcatgtgatctattttgaagaatgtttcctgaacacttgagaagaatgagtattctatttctgttgcactggtctagaaccagacccacaatatctctgatgtatgtctgaatacttatcttgaataattcctctacatagattgagaacctcattagacagtgttacagctttgtgcttcaactgtcaacatatagaaaactcaagaggagaaagtctattgtccttatttatatttttgctcatgtataatttcttcctttctaatgtactgagtctttcttttattctgttctttatgtttagagaactttcttgagtcattttttagggtaggtctgtgggttttaaattctcttagttctcttctatcttatgtctttattttatctctattcctgaagaatattttctctggatataggattctgggctgataggttgtttttttttttttttctttcaacatttgaaaaatattgcagcactttcttctgggctctgtgattattgaagagaaatctactgttatccaaactgtttttcccatataaccaatatgtcatttctctctcaatgctttcaaaaatttttctttgtatttagtttttagaagtttcactatgatgtgttttgatgtagatttcttacatccattttttttttcttttttggtcaatttgggatattttaagccattatttcttcaaatactttttcggctccactgtctttcttctccctttctggaactcaaataatactaatgttacatctttattatagagccatatacccttgaggttgtgttcttattttgttttcaatctattctctctttgttgtttagagtggataatttttattgttatgtcttcaagttctctgattctttcttctattctcagttctgttgttcagtccatttgttcagttgtctattttggttattatatattttagttctaaaattcccatttggttctttttatcttatatttctttgttgaaatgttctattattattatctttttttttttttttttttttttgagactgagtcttactctgttgcccaggctggagtgcagtggcacgatctcagctcactgcaagctctgcctaccaggttctagtgattctccctgcctcagcctcccgagtagctgggattacaggagcccaccaccacgcccagctaattcttgtgctttttagtagaaacggggtttcactatgttggtcaggctggtcttgaactcttgacctcgggtgatccacctgccttggcctctcaaagtgctgggattataggcatgagccgtgcctcacctgaaatgttctattattttgctaaaaagttctttgctcttggtttgataagtgattttttttattgaaaccagtatattttgtgcatcatgatacaaaacactggatcttttttaaatcctattttagcaggtcttctctgacaccactctagtgaatgaaaggggaggctgcctcatttctgcgggtaggcttgaaaggtctggcttctcttctgttgacacgttgcggccaagggagaggattcctcataacttctggatggggatgggagtcgaggctcccactaggaattctctgacactatcccagcaaggagggcacctcattactattttttttttttttttgagacagagttttgctcttgttgcccaggctggagtgcaatagcacaaactcggctcaccacaacctctgcctcccaggttcaagcgattctcctgcctcagcctccagagtagctggaattacaggcatgcgccaccatgtccggctaattttgtatttttagtagagacggggtttcttcatgttggtcaggctggtctcaaactgtcgaccttaggtgatccacccgcctcagccttccaaagtactgggattacaggcgtgagtcactgtgcccagccctcatgactagtctttacatggcctccactgacaccatggagaggggagtaggtggccttgtacccagtgagtgggatgaaagtcctgaatctgtattaagcttcttttgataccagctgacaggggtattttaacctggcaacacactctgggctcttcagttggtctttattgcagagtatagggtataattacagttttttctgtgacatttcgctggagtgggaagttatcgtctgaaagttttctgtcttgtaaggttgactcttttctggtccattggctaatgagaacaggctttcattatgatcgcgcgcacgcgcgcgcgtgtgtgtgtgcttattggtggtttctgggttgctggcttcttcacttccaagtttaggatacatgaggcaaaaaaaaacaaaaaacaaaaaacaaaaataaaacctgagggactcacctctgcgtcattcattgggtctctgcatctttagccagtccctcctctccatccttgagacttttattttgtttcttttgtacagaatatccagaatttttagttgcacctagcaggaagaaaagggaagactatgtctactccatcttttcaaaagtggatgcccaagctgtaataattttagaatgtaaaatattaaagtgtcaaatattgttaacagaaatagatataaatcagataaaaaccacttaaaatcagtaagaatcctagccaattggaaagagtagaattcgacctctgcacatacaatactccaaaattaattccagatagattaattgtataattaattaattttaaaagtgaaataatatataggagaaaatataagcacattatataatcagagaagtgaaattgtaacattctttacacaaataatggttgtctttaatatgtaaataattcttacaaatcagtaagagaaatatgactactataagcaaaaaataattagagaaaggcccaaacagatgatttgcataaagaatacaagtacctaacaaatatgggaaaatgctcttcttttcaaataattgaagaaacaaaaattagacaaattaattccttcgggttttagttcggtttagtttggttcctttttggcttattcatgagcccttcaaataaaatgaaagcaattttaggtgggtctgagctgggtcctaccttgcaaatccagctgtgatgggaaccaaagtaatacaatctttttggcaggaactttgccaataagtatcaaaaatcgcaaacatcatcattttttggaccaaataatttcactttgggaaatttatcccaagaaaaagatgattaacataaagattcatggagaagaatactaataacataagtattaatagtggtaaaaggtaaaaaactaaaaatcctaacaaagaagaattggataactaaagtgtggcatattcatagaatagaataccatgtggttattttaaaccatgttgtataagaatacttaatgccacgggaaaaatgctcataatttaccattaagtaaaaaatgaaagtcaaactatacagtagtttagacactaatgctactttaataggtaaaaatgttcacagaaataacgtattaagaaaacacacaaaaatattagcacttgaaaattaagtacaggaatcatgatgtattttcatttttcttctttgtattttttaattttcaaaatatattattacaaagcatacttttatatttaaaacaaaacaataaatgtatgtgggggatgtctggggatgccttcagctgcttaatgatgtcatctgagacgcaggctctttctaacatttttattctgccatccttagcattttggttttccttgtcacgcttgttgctgcatcattataagatagctatggcacctatagatatcacaaatgctccaggctggaagaagaaagagagcccaccctctgcatctatacctcttttgatcaggactatttgtcagagacccctttcaacagattttgcttacatcccctatgaacatccaaagctacaaaggaagccaaaaaataagtatgcagttttgcagactcttagactagatcatgacaagaaagaagggaccaggaatggatgctgagtgagccaactgcagtttttacatagtatttttatgtacaaaattaaaagcatattttgtagagtgcatggattgaatgtagtgataaccaaactatgcaagaattgtgctttgcaggccctgtaaaaagcattttgtgacatctgaccattaaaagaagttaggagatgtacttgcaaactattcaggctctgatccctacattgcaggagtctgacactataaattgtacattttcatactgagaaaagattagaaggttgatgtagggtacgcatgtcttaaccatcaactcattcacaggcactttgttgtatggcatagggaagagccctttcaagctgtgtttggttacatgaaacctaagtcagccatccagtcattgtagaaaaaaaaatcatcaaaaagcaagattcgtcatacaactgaaggcagcaagctgttggacaaagagcaaacaaagcctgtggaggtcaggagatctgagcgttccatcaggttctgccactaaacagctgtgtgcttttgtgaatgtaattaacattgacaaatttcagtttcttaatctataaggtcaggggtttgcagaaaagattgcttagggcactttgagcataaaatggctatattctattataattgatatcttataaaaattactaactgcaaaggtaatgaatcacattaaacctctcactgtgagttgacaggaaggaacacagagagatctggaggaacagagatgggcagagtcactggctctgtgtcagctgctgtcatttgtggtagatggtacattccacagaggaaatgcaacacatataaacctttagaacccactaaaactctgtcaacattatttttgcataattggaaaaatgggtttgcagtgcaatatattgagcccacaccccaatttcaagacctggtgtccttgttgatttaatttcacaaagcaaaaaagaagatacattaggagtgaaaggaatcacattggtggggaagttgttacaatagtcactaaagtctttcagtccaggaatcagaggccatgcaaatgtatcaacgttcaggttcagatgaaagttatggaaagttgtggttgtcagcacaggttgtgatggggttggaattcttgctccaccatttagagctgtgtgacagtcttcaagttacttaccacatctgtgcctttgtttcttatctgtaaaattagggacaatatttgcacatatctctgagaactgggtaaaatttaaattttttttttagtccagtgcctggcctctaggtacttattatcagagaggtaatttttaattctttaagtaactcaatgaatttgcaactaagcttataaactgttaggtagttagtaacttgtggtggatttcttaatttggggaataaagtttctctatgcagaaatgtatgaaatggcaaaagtagaaagcctaccataaagcttaagggacacttttactggaataccttttaggagactcaggcagttttgcacagagctgttgcctgcaaccctgagccgcttcctagtacagctctgctcctgggtaaaaggcaagagacaagagagctataaactctgtgtagtgcaggaatataaatgtatcattgtattctgcttggactatgtccttcagcaaagtgacaatttaactgaaagtggtcatacagacagaactggcaggttttccactattgcctattcctatttctcttgctggaaatcgctccaggatccttaacaggtggtctgcttctagtccctaaatttggaatgtcaaaatggattctcagatcaatgggggaaggctgggttgttcattaaatggtgttgagacagctggctaagcatttggaaaaacaaagttaggatcctatctcaaaccaaattaaaccacaaatgggttcaatgtttaaagaaaggcagagagatgaaaatatcagaagaaaatacaggtgaatagcaaaatagctgtattatagggaaaggtttcatgactataatactaagagcagaatttatatttataatgggaaaaataatcattgactacattaaaaatgtaaaacttccctttatatatataaaaactactatggagaaaataaggagaacagaaccttaagaaaagtcactttcatgtatcaggttaaagggctactgtcctgtctgtggaaagagctcttataaatgagtgaggaaaaagatgacccgtccgttcccctctccccgccccacccccaccaatgtgggcatacccataaatataatttttttaaaaaagtcaaaagggtaataaacatgaaaaaatttcagcttcacatgtaatcagccacttctcatgtatcaagttgtcaaagatgaaaaacaacaaaactccacgttagggaaagaaatggtcggcaatatgcagttgcagacatgaatgctggcactacaaatacacaaaaactagggccgggtgcagtggctcacgcctgtaatctcagtactttgggaggccaaggcaggaggatcacctgaggtcaggagttcgagaccagcctggccagcatggtgaaaccccatctctacaaaaaatacaaaaattagctgggtatggtggtgggcacctataatcccagctactggggagcctgaggcaggagaatcacttgaacccaggaggtggaggttgaagtgagctgaggtcgtgccattgcactccagtctgggcaccaagagtgaaacgccttctcaaaaaaaaaaaaaaatacacaaaaactttttggagagcttttgggccatgtagataatattctcagtgaaaagtctttgacatcttctagtatgttacccttagaaaattatcaatcacatgcttggcgatttagatctaggagtatcatcgcagcatagtttgtaatttcaatatagaatgttaaggagatatctgtcatctgaggctggttaataaattaagacttagtctacataactaaatactatgaaactttttaggaaagtaagttttaaggtagcatgatgtccgcacatgaaaaaaatatataaaacgggtatagtacaagtcatatttgtattaaaattctatagcttgttatgtttggtatttttaacatatacatggaaaaatatgaatatatggttaaaaataagtatcctccagtccaagaccccttaaggctgtcaaggtcataaaaaaagcaaagaacaactgagaaagtgtcatggatgtggaaagacataaaaattagaatctagtgtcgttccctggattggaacctataacagaaagaggaccttaatggaaaactggtgaaatctggagtttcatcaatagtaatggaccaatgtcaggttcttggttttgacaaatgaaccacagtagcataaggtgtgaacaatgggagaaacggggtgaagggcatatgggaactccttataagctatctttgccatttttataaataacaagtttacttgaaatatcaagccatttggccgggcgcagtggctcacacctgtaatcccaacactttgggaggccaaggcgggcggatcacctgaggttaggggttcgagatcagcctggccaacatggtgaaaccctgtctctactaaaaatacaaaaattagctgggcatgatggtgggcacctgtaatcccagctacttgggagactgaggcagggagaattgtttgaacccaggaggcggaggttgcagtgagccgagttcgcgccactgcactccagcctgggcgacagagcgagactccatctcaaaaaaaaaaaaaaaaaaaattaaacctttcaaaatgtgtaaccctgaggagtgagatttgagtatgggacataatgactttcagattctatgtggaaaatgttgtacaatgaccacacatattacataataaaggatgaactgacataaaaaaaattgtagaagtatatttgtgaacatggaataataaaaaagcaaattataacagtataatcttacttaaatatattttaattacttgcttttgctttcatttatgttccaatttttaaaacaaatatacatttcttataggacaaagaataatttaagtttaaaatatccctggaagtagatgtggggcaggcagaatccccaaatctccagtcttgcaagttagaatcgggggtttcctgatcctgtacctgctccttaaaactctggggccacaaaaagcagatcgtctttgttgatggggactctggctctttattccagtaataaatttaaatgaatatcccttttttttaactatgatccaacacatcttgtctgtgcttagattattctattcaagacacaagggtgaaggtattaattaaaaagaaaaagaataatttaacagtatcaagcattctttcctgctgtgtaggttatttataatatgattttcagagagaataatggccagttaaataagagaaaatacaaactcactacacttaaaccctgctaatagaaaattgaagacaaaatgtaaacaagcattttgccttttttcatgtttatcacataatcacagcactgccatatttgggaaaaatagcctaatatttgaatgcaaattctactgatatttattgtaatattttggacacatatccacataatgcaagattttcatgtatttgtcttactcagaaatgaatttgctggatggtttccaagcagtaatttggatttataagaatgtaaatacattatgattgagttcccagtagcatttaagctcatggatattaggcaatgcctgatgccaagcaacttcggaagccctggagactcagcggctcacagccctttcccacgggccacccactctcgagggccatatttccaaatgcatttctgcgagtctgagagacttgaggatttgcaagggccttcctcacagacacagtggcttatgcccacttcacccagtttctcgcattgttcacaccttacgttactgtggttcatacgtcaaaaccaagtgggagttaccagtgggtcaactggtcattataaaatggagaatgaagtgctgtaattggtgagactataagatttcatgggagcgcaaaagagaagcaccttgaaacctggacccctggggacaggggtggccaagatacaggctggccaagatacacagtccatggaacgtgaggctcggaggaagcagagtcatttcccaggagaatgggagaccagggagaagagacggtgctccaggcagaggtgactgcacctgaaagggcctggtgagggaggggagtgagcgtggtgggtctaaagaactggacagagcccccgccagaccacaggatgccaagaggtgggtgagagccagagcccagcgggaggagcagccccatcacgaaaggccttgaacaccatattaaggaaattggattttatttcatggttgctgtgggctaaattgcgcctccccaaaactcatatgtatggaagccctaatgctatagcacttcagaatggaactgtatttacagataggggccttaaagggctaacccagttaaaatgaggtcatgagggtgggctgtagtctgatctgactgaagtctttttttttttttttttgagatggagtcttgctctgtcgcccaggctggagtgcaacggcatgacctctgctcattgcaacctccgcctcccgggttcaaacaattctccctgcctcagtctcccaagtagctgggattacaggtgcccatcatcatgcccagctaatttttgtattttttaatagagacagggtttcgccatgttggccagactggtcttgaactcctgacctcaagtgatccgcccacctcggcctcccaaagtgctgggattacaggcatgacccaccacgccggccctgactgatgtcttcataggcaaaggaaattaggacacagacacacccagagggaaggtcacataaagtcgcagggagtatacagccacctgcatatcaagaagagaggcctcagaggaaactgacaccttgctcttggactcccagcctccagaattgtgagaaaataaatttctgtcatttgaaccactcaatctttagtactttgttacagcagccctagcaaactcacgcaaaggacaatcaagtgtcctaaggaaaggcagggggcaggggaaggatggttagattcatccttttgaaagattactggctggtgggcagaatggataggagaaggtagagttgggggcaggaagttcaaaagccctttaagtgctagacaatggttgcagctgctatggaggtctgtgcaggctgaatttgcacaactctggggggtgccttctaaatacagacatgcctcagagatgtaatgggtttgttccagaccactgcaataaagcgaagattgcaataaagtgagtcacacaaagtttttggtttcccagtgcatataaaagctatatttacactatattgtagtctattaaatgtgcagtagtgttatgtctaaaaaaacaatgtacataccgggccaggcgcagtggctcacacctgtaatcccaacactttgagaggctaaggcgggtggatcacctgaggtcaggagttcggaccagcctggccaacatggcgaaactccgcctctactaaaaatacaaaaattaactgggtgtggtggtgggtgcctgtaatcccagatactagggaggctgaggccagagaatcgcttgaacctgggaggcggaggttgcagtgagctgagatcacgccactgcactccagcctgggagacacagtgagactctgtctaaatggaaaaaaaaaaatgtacataccttaataaaatatactttgttgccaaaaagtgagaatgattatctgaaccttcagtaagtcataatcattttgctggtggagggtcttgcctcaatgttgatggctgctgactgatcaaggaggtggttgctgaaggttggagtggctgcagcaatttcctaaaataagacaacaaggaagtttgcctcattgattgaatcttcttttcacaaggaatgtctccatcacatgcaataccatgtgatagcatgttacccacagtagaactactttcaaaattgaagtcaattctttcaaaccctgccactgctttatcaactaagttgatgtagtattctaaacattttcttgtcatttcaacaaagtttacagcattttcattaagagtagtgtctatcacaagaaaccattttctttgctcatgtataagaacaactccacatcctttaaagtttgatcatgagattgcggcaatgcagtcacatctgcaggctttacttttaattctagttctcttgtatttaccacatctgcagtgacctcctccactatagtcttgaacccctcaaagttatccaaaagggttggaatcaacttcttccaaactcctgttaatgttgatattttgacctcctcccgtaagtcacaaatgttcttaatggcatctagaatggtgaatactttccagaagcttttcactttactttgcccagatccatcagaggaatcactatccatgacagtgatagtcttacaaaatgtattcttaaataagatttgaaagtcaaaactactccttgatccatggactgcagaatggatgttgagttagcagccatgaaaacaacctttgtctccatcggagctcttgggtgaccaggtgcattggtcactgtcaatgagaagtagtgttttgaaaggaattctttttttctgagcagtaggttccaatggtgggcttgaaatatttagtaaattatgctgcaaacagttgtgctctcatctaggctgttatttcatgtaggaagcacaggcagagtagatttagcataattcttaagggccctaggattttcagaatggtaaatgagcatttgcttcatcttaaagttgccagctacattcgtccctaacaagagaatcagactgttctttgaagctttgaagctagacattgacttctcttctctagctatcaaagtcctagatggaatcttcttccaacagaagcctattttgtccacatgcaaaatctgttatttatttatttatttatttatttatttatttatttattattttttgagatggagtttcactcttgttgcccaggctggagtacaatggagcgatttcagctcaccacaacctccgcctcccgggttcaagcgattctcctgccccagcctcctgagtagctgggattacaggtgcccgccaccacaccagctcattttgtatttttagtagagatggagtttctccattttggtcaggctggtctcaaactcccaacctcaggggatccgcccgcctcagtctcccaaagtgctgggattacaggcatgagccaccactccgggccacaaaatctgttttttaatgcagccaccttaattaatgatctcggctggatcttctggataacttgctgcagcttctacatcagcactgtctgcctgaccttgcacgtttatgttaggaagacagcttccttctttgaacttcatgacctaacctctgctagcttcaaacttttcttttgcctcttcctcacctcttttgagctttcatagagctaaatagagttagggtctttctctggattaagctttggcttaaggggatgttgtgggctggtttgatcttctatctagaccactaaaactttctccatatcagcaataaggctgtttcgctttcttatcattcaagtgttcactggagtagcatttttcatttgcttcaagaacatttaccttgaattgacaagttggctagctgtttggcacaaggagcctaactttcagcctatctcagctttcaacgtgccttcctcactaagcttaatcatttctagtttttgatttaaagtgagagatgtgtgactcttcctttcacttgaacacttacggaacactgtagggttattaattggcctaatttcaatattgttgtgccgcagggaatgggtaggcccaaggagagggaaggagacgggaactgcaagtcagtggaacattcagaacacacacatttatcaattaagtttgccatcttatatggtgtggttcttggcaacccaaaacaattgcactggtaacatcaaagaacactgattggccaggcttggtggctcatgcctgtaatcccagcattttgggaggccgaggtgggtggatcacgaggtcaggagttcgagaccaacctggccaacatggtgaaaccccgtctctactaaaaatacaaaaattagccaggtatggtggcacatgcctgtaatcccagctattcaggaggctgaggcaggagaatctcttgaaccctgtgaggcggaggttgcagtgagccgagatcatgccactgcactccagcctaggcaacagagcaagactccatctcaaagaaaagaaaagaaaattactgatcccagatcatcagaacagatataataatgaaaaagcttgaaatattatgagaattaccaaatgtgatacagagacatgaagggaacacgtgctgttggaaaaataacatcaatgggcttgcccgacacacaggtgccacaaattttgaatttgtaaaaaagcacagtatttgcaaagctcaaaataaaaaaaaaaacccaaagcacaatacaacaaggtatgtctatggatgataatacaaatcatgtgcccacaggtcacacaatacacacgttggcattgcaagcatattcgagataccactaatgacaagcataggtaaaggaattgggaagaaatgcatagattcgagagaaacttagaaaatagactgaattgtgtttgaagattggttggatactactagtaagggagaagaaggagtaaagcatgaagctattttcagtcttgggcaactgggtgggtgggggcactggcccatgaattaagaaaccaagcaggaagatctgtgtcggagaggataattgagtctgttttggatttgagttcgaagaatcaaaaggagctcttcaaattgagattttcaataggaagttgaaaatatgaagattacagacctttacatgcatcatgatttttcatgatttaaatagcctaatattttaaatcatgggggttgataagaactgaaggaatactgtgtaaaataagaaaagaacataaaaaggggtcaggcatggtggctcatgcctgtaatcccagcactttgggaagctgaggcaggcgagtcacctgagatcaggagtttgagaccagcctggccaacgtggtgaaactccatctctactgaaaatgcaaaaattagctgggcatggtggcatgcacctgtaatcctagctactcgggaggctgaggtaggagaattgcttgaacccaggagatggaggttgcagtgaatcaagattgcaccactggattccagcctgggtgacagagcgagactccatctcaaaaaacaaaacaaaacaaaacaaaacaaaacataaaagggaaaaaagatgccctcttggcatccaaactcttaagtcagaggttcattacaggacttagcgggcaaaaataagaaaaacggtgttgcccattttcttcccctcttctacctacctgctggttccaggcacaggtatctcttcatgttcttaaggcttgagagtaccctgaaagcagcagcagtgaatgtgtggggtgatctcattcacccagcaaatatggggtatctacagtgtgtcagatactgtactaagtttctgttgatcaaaaaaaaaaaaatcatacttctctccattctcaaaacaattcagatgcttggggtaatgcatggaccccagaattataattctagtggcattacagggccttcagaattgtaattccagcatcagaatggaagaccaagatcgggtctttgtcagtgtcctggggataatcagaagatctctgcccaacagattcacatgactgtcttgctaaaggaggttaattcattcaaagatgggaagtgggagaatccaagaaagttcacttcctatattccctgatcctacaccttgggaactttttttgcccagcagatatctttgatgttacattttcttgcctctcttagctctgagtgtcaaaaaaatatattttcagttttgaggggactgtttctaacacacttccttcactccttatatagggtatagtgggcaatatccatccatcctttatgagtcaggtcaccttataaatatcaattattaaactgagtaatcacgtagtgatgtctcattgacctgagtgctaaatggctatagattgagatgctcttggtttgtcttttgtctttttcctttctgacacagagcatttttctaagaatcatctctaatatgaaaactagaaaacaaaattggcaagcttgggaggctctggaatatctgcagtgtatgtacaataatagaaaatagactctttgtaagggtctttgcatgaaattttgggcatggctactgaaacacctatgtagatatacaggggtgctttcattcattcatttttgcttcctcctgaatacatagctgaaattgctttaagaatatatatggatttgggaaaagcaaaaaacaaagccactgccccggctcctacattgtcacacctgatcaagggataatagctgaaggttgtgcttcgcaactcagagtcatacggcacctgtcattatctaagctggggttcagatgatgctagttatcacccactctccagatatttgtttttattcattaacatgcctgagtgtttttgtctagttattgagaaagatgggtttagaaattaggcttcgcaacaggacaggctgggacagaagaggccttcagccgaaagcatgatttgtgcatacctaggaagaatccctttgggaccacctgaaagtgaccaactaacaataggaaaggaggttttattctttctggagctcacagtattataatttgggcatagatgtggatgtaacctcattcccagccccaggctggtgaggcctggagatatttgggcaacatgagataagtaaatatatattcaaatccttctgggaacctgggataagatagtcttgcttttttaaaaaaagaatacttgtaacatgaaatagctatttatgttgatatttgacttaagatggcagtttgttcagcttagttactccatcaacagcaaaaaaattcatatgtaggagattataggaaagcaggaagatttactgttttggcaggaaaaaagggaaaacaccagccatgatcaagaagtcaacaatccttaacagagttgtaaaattcagttctggaagcaatggcggaattcataactagttattcaatctatgtccttgtaacgggacggtcacgtcaaaggagaaactggacttggatgggagaaaaggtttgaagtgatttctcacaacgttaagtcaaatttgattccaaagcattccaaggggctatttcaagtccttttattgttttatacttgttcaataccatttcaggccaaatgagaatgcatcaagaaagtctttgtttacagagatgggagagatgcaacaaagtcctatcaagtctgtaaggagaagaaaaatccacaggttggaattctaggaaacaggctctacacagatggatgtgtcacctgcctctgtttacccatcttactttaacacagattagctgcctaaaaaacatccaggtgactctactgggtatagacatcttgtgtgcagttcttacaaatcagttctagggaaaacaaagctgactgtcaaaagcccgttaatagcagacaaattcttctgcaatccttcaagcaatgtttctcaactgtgatgtacatacatatctcctaggaggtattgcaaaaatacagattctgattcagaaggtccggggtggggcctgaaatttcatatttccagatgaaatgctgttggtccaagtcacaccttagcaagttgactgtttctataccatccatagatggagaaaaatctcaatgccctttctcatctagaactgtaggaaaaagctattagctagagaagcaatgattgtccttgtgtagaatatgggtttaattctaggctgcctgcccttgatggatgagccttataggtaatcaccaatttaaaataaagaaagatcagtgtataattttgtagtccctgtcatctgtcacagttataaaatgccatgttgtgaaatgctgaatttactcagaacccccccagttactggcaaagtgtccatgctaagtttctaatttcaaatatgctttgttgaaaagcttagaaattgtatcacttcatggaaaagagagcactgagaaattatatgacttcatggaaaagagagcaagcactgcactgagattcagaagacttgcaatacagtctcagttttgtcattcatttgctgtgtgacattgagtcatgccttctacccttctgaggctcaaatatgaattaaatagcgccaactagatgccttctaggaatgctttcaactctaatgttccacgtgctatataacatatggaaacataatttaagttctcactagcgatcaggaagttgccttgttagtgggatgcggttcatcattagtgttaatatctctggttttatatcagtgagaacaaagaggtgagagtgtaatagttgagagcactggctttgaagtcaggcagagttgggttcaaatcctgctgcctcatgttctaggagtctcatggattacaaaattgacttaatttgtctgaagttcagttaggtcatctgtaaagtccgatctgtgaaatgggtaagaaaataaaccagcctctttggaatattgtaagtagagtggcctaatgttgtggtttgacgggaactgagggttttccctggaaatgggactttcagtgctaaaagcagaacagttcgaggcaaaccgggatggttggccaccctacagtcacaagtgtcacctgagataaacctgtaaagcacatagaaaatattcaatggacactagccatggttgtgaatagcacataaatatagagatatcagggtgaatttttttttttttttgagacagagtttggccctcgttgcccaggctggagtgcaatggcacaatctcagctcactgcaacctccgcctcctgggttcaagtgattctcctgcctcagcctcctgagtagctgggattacaggcatgcaccaccacgcccggctaattttgtatttttagcagagacagggtttctccatgttggtcaggctggtctcgaactcctgacctcaggtgatctgcctacctcggcttcccaaagtgctgggattacaggcgtgagccattcaaccagagcacgacccaactttgcctttttgactctagatttctactttttaaaggttatatggttttctttcttgagaaacagagaggactgtgtaaatgtgacatatcaagccatacaaaatggctgcctttctgcaaaataaaatttgaatcaagggacagaatagcctcttaatgatgagccccctacaagcctggtttggggatgctgatgtggccacaggcagacataggcagcactcagcagctctgatggatgcaacaccagccaggaatgtgagcagctgtcctttctaaccccgatgtcatttgctgaggcaatgccaacttccttctcttccatcaaaacattccagagttcatccttgtcaggccatatacagatatgtctcctacgatttgcataaggccattgtttctggaatttggggattttccagctagaatgtctcacgtatgctattctgcacagacaattgaagagaatgcaggagccaaattcccttgttatggctacttctgccctctaactggttctcctttgggagcttctcttctcttcctttctactctctgcccacctgggctacccactcctctgggctcaaggtccaatcaaccacacacaaagcttcaattctggttgtaaagctgtcagtcacaccagtttctcatattttctgtctttgattactcttagtgttatttcttctctaatttctcctgtggtttattaactgcaatgttgtcaacttcatcccagctttaggtgacctggaaactataacaggacaacaggtgatctgtcctgcttgtccaggacagtccaggattgcacctgttgtcccaggttactaattaatcgaacccccgtttactttcaaaaatgtccacgtttggaagacaaacgatacaatcacactatccagacccaacctctcgagttctactttcatctgttttatattgagcaatgatctcccttataagattttaatttgagtgtaacattttgatatgtttgaacaaaacaaaatgaaaaatcaatcttgccagaaagggcaagacattcataaaaacagccaactgatcaacccgttgttttgccaggcagagcgaaacatttatgaaaacagtcaactggtttgaggagaaaattcaccaaaagcaatatagctagaagtctaacatcttaatgaggaacagtgctcttcgtccagactttatcgctttaggtacaagatgcccaaaacacaagtttgtaccttacgagcaaaattgtgaattgtatatagaaaaaaaaatagaggtgaatcaccaagtaaatgggtcatcaaaatgaatgtcttcaattctaccttaggagaagcttttggagacaagactggcaaataagtgggcagtatatatgaccccatggaaagtcctgggggtttgggatccatcaaaggactggaattaggatactgacttttcttccaatggtgtccctgcggacaaatggcttaatgtctctgaacattattttcatgacttacgctttcataaaaagttcaattaaccattggttttcaaactatgctctgcagagcccaaggatttttagcagaggtgccctgtgcaccctcaggagttatacttttattcgttttatatcaagcaatgatctcccttgtaagatgaaaatttgagcttaacattttgctatgtttgaacgaaagattttgatgcaaaaataaaacgtgagcatttatggtttaggtagcctctgagctccctccaattctggtatatgtgattctaaggccttagaaaatgtcagcagttggagaactatagatagagatgaacaaaagattcctctgctgtctgcaaagccctaaagtaacttgctaataagtgcagaccaagagggccttaggccgtgtgctctgatctattagagaggctgatggagaccagggtgtgtctgaggaaagtgctaatacagacatacagagctgtggctgtgaggtgtcttcgctggaaaagagcattctgggactctgaaaagtgttccccgagatgttctctatcactcacaaagacccggagattctaaactggtccaaaactgattctagatttttggcaaaaggcctggtgtctgaaaataattaccagtatgtccaaaattctttaaaagttctaataataataaagtctggagcattctagcacttgggggagtggggtagcatgtataaagttaaagagataaacactcatctggggtgaaaattaaaattcagaagaattaggtaagataccatcacgagtgcaaaggtagatcaggaaatcatgctcctttcctgtatttcaggtatcaggagagaaaaacagatagtggaaagtgtgtggcagaagcgcttgctttcactggcctggaggaaaagtcaaattttgagtcagaagaaaaagggtagcaacactgagaagtctgtgtcctggctgcttgtgtggtcaggtgtactgctggtaatcaaactatgaacctggggtccatatgtccttctctttataaaagtacgaaataagttagggcttaagattgaactgcaatgaaaattatttttgctttcctttttttatcttaaaaatttttaaagggattttccaagtttatatactgtttatctcatatctggaacacttttaaattttggttagatttggagtaagtttgattatagtcttttctatagtcttttcttgatccttaaagaatgattcatttgattgctgtttcttatttcactgaacttttaatcatgtcacaatactatttttaggagtgtctatggatttctactgcctgagaagataaagccccaagtcttcacattaaagactctcataatctcacattggctttcttttcagtccttatgatccagaaacaccaggttacccattagttgccaagcacattctttaccgtcttcttagtgtccattcatctaccctcccgccaccatatctcctccttcatgaagctttcccagcacaggaaccccaggtggaatgaatcacttctgctcccagaatcctctgctcccagtgatggccattgtggatcctgctgttcctatgtgtataacccccttgctgtgtaggctgtaagaagcatgaggacagggactgtgcctattcttttttataactggcatttaacatagagcctggcatatgacagatgtccaacaaatcattttagaagaaaataattttcttaattaatgaatttttcattgcatctaaaaattagggggctgaatagtcctttaaatggtggatgcttctttggtctgttttaactttataaacttacttaagtggttgtaaaatgaagagtgctgtaaatctgttaagactacatcgtttcagttaaggatgactgattaagcacatgtttttattcctactcctcttccaaatgtccatagaactgctattccccccacacagaaaaactagtgaaaatatctgcattaatgctgcaaaatagggaaaagcattatccacatgaaaacaacttggaggaatttctgctgaatatagtgcagaggcaagaagtcagatgaaacccacccatagttgaagatatgcaaagtagcccccaccggagcagccaatggaaaagcacccctgacgtgagctcttggaaatctccttgaatcaaggccttggtgcgccatctataaacgctgctaaaatgtcgtggatataaatggaaaagttgaggctggttgacaaagttgataaaacctctaaaagatgattcaaatgaacaaaatgtgtcaaaaacaaattatgagataatcagggaaatgtgaacccagactggatatttaatatttcaatgattgttaaatttcctgtggaataatggaacatgagactttggttacactttgtatttatttatttatttattactattttactttaagttctgggatgcatgtacagaacgtgcgggtttgttacacaggtatatgtgtgccatggtagtttgctgcccctattgacctgtcctctaagtttcctcccctcactccccaccctcccaacaggcctggtgtgtgttgttcccctctctgtgtccacgtattctcattgttctactcccacttatgagtgagaacatgtggtgtttagtttcctgttcctgtgttagtttgctgaggatgttggcttccagcttcatccatgtccctgcaaaggacatgatctccttcctttttatggctgtgtagtgttccattgtgttatgtaccacattttctatatccagtctatcattgacgggcatttgggttggtttcatgactttgctattgtgaatagtgctgcaataaacatacgtgtgcatgtgtctttatagtagaataatttatattcttttgggtatatacccagtaatggtattgcagagtcaaatgatatttctggttctagatccttgaggaatcaccatactgtcttccataatggttgaactaaattacattcccaccgacagtgtaaaagcattcctatttctccacagcctcggcagcatttattgtttctcgacgctttaataatcaccattctgactgacatgagatggtatcttattgtggttttgatttgcatttctttaatgatcagtgatgttgagctttttttcatgtgtttgttggctgtgtaaaagtcttcctttgagaagtgtccattcatatcctttgcccactttttgatggggttgtttgtttttttcttgtagatttgtttaagttccttgtagattctggatattagacctttgttagatggatggatttcaaaaattttctcccattctgtaggttgcctgttcgctctgatgatagtttcttttgctgtgcagaaactctttagtttaattagatcccatttatcaattttgacttggcattttcatcatgaagcctttgcccatgactatgtccgcaaggtttgtctaggttttcttctagagtttttatggtttggggttttacatttaagtctttaatccattttgagttaatttttgtataaggtgtaaggaaggggttcacaagcatggtgctgaaaccctgcatagtgttcctaagtacaagaacgctatgtgtgccttacagagaaaatgcatgtgttcagtaagcttcattctggcattacttatagtgctgttggcggtaaattcaatgtcaatgaatcaacaacataaataaagtgtctttaaacagaaacatgcattatacaagtttatgtattaatcagttgacaaaaatgttgtggccagaggctctcaggaacctaatcctgtattttccctaggagcaatgattcagtattcactaattcagtgttcacagtgattttaaaaaacataactaccatgaataacaagaattaactgtaatcacagatgaaatatgtgtctgaaatttgcttcaaagtaatccaggggactggcagtagaaatatacatggaacagactggccatttgtaaattgttgaaggtgtatgatgagtacatgagtgttcattatactgttctctcaacttttgtatatatttgaaatttccaataacaaaagttttaatttttaaaagagagagacagaatggcatagcagaaatacaagtttggatcttcttcaggcattaaaaaatcatttagtgtggtatataaagaaatataattatttagaagtagaatgaattaaatttcatgttaagtataaatgatccagtgccatgtaaagtcagtatatacaaaccccccaaagcaaaagagagtgtatgagtgtgggctctataaattgtaggtaatatagaaacttacatgtcatttttagaaagtgaaaagaaaaagacaagagacatctaaataaaagcctatgttctgccatttaactgtaataaagctcagtttctaactttcaggcttgtctatcccattaataaatctgcttcaggctcctgggacagctctgcctgcctctgctccctcctcactgggagagttcgtaacaggtcaagtccgagggctaatgccccacttcgtcactacctgtttccactgcaatgcctcaacttgctctccagctctctgacacttattcaacagttaagtttgccaaactaaagcctctatgtccttccatccttcctcatctcctaccacagtgttttccaaatccattctgaggggtgctacagctccggagacattccccaggagcacaaaggcagagaagctggagtcccgggtgctactgcagcatagagggctctgcttttatctgttttgtattttgagttttgcaaaagattttgcaagaggaaaaaatgttctgttttttaggaaaaaaaattgaacaagccaaacttctgagacattttttatgatgggagcacatggggctcaatgtgtgtgtgtgtgtgtgtgtgtgtgtgtgtgtgtatcccagctgttcctggtgaatcctggcttacaccaggtgaatgactcagacttactctacatctttcattctgttttcttaacgaagaaaagaaaaaggctcttttgcagcccaaatcgatataggttcctctgaagtgcttagcaatggccagatttgcataaagctgtgtgttgttttgggatcttcagcttgagaaagatttggagaactctgagagattttaaatcatcattatcattttttgagagccttttgtatgctggtcatcacactagttactttgcatttagtattgtatttaaggctctcgataaacttgcaaagtagttggtagcatctgcaggcatcagcactctagcacaggcaagtgacctatacccagatctcattagcataagccacagaagctcacaaaagcaaaatgcaggaaatgacgagtacagcctgtctctggaaggaccggaatccagagctccaatgccagcagaatgccccctgccttctctcctctcagcctttatgtttacttaacatttgtacaactgggaagatggtcactttacatgctttccgtgaaaacagagaccttttttgtttatttgttttattttcctaaggtctttttttttacagcagggttaggataacagaaaaataagtcggcttcacatgcacaacctctcctatcatcagcatttctcaccagagtggtacatttgttgtaattaatgaacctacattgacacatcattatcacacagaatccttagtttacattagggttcactcttggtgttgtatgttttatgtataacgacatggatccatcattaaaatatcatacagaatagtttcactgccctaaaatctctgtgatctgactgttcatcccttcttcaccctaaccccaggaaaccactcatctttttacggttttcatagttttagcttatccagagtgtcttattggaattgtagtgtgaagccttttcagattggcttctttcactttgcaacatgcatttgaggctcttccatggcttttcattgcttgatagctcattcctttttcatgccgaataatattctgttgtctagatgtaccaatgtatttattcatctactgaaggacatcttggttgcttctaagttttggcaattatgtataaagctgctataaacatctgtgtgcagatttttgtgtggacgtaagttttgaagcccaaggagtgaaactgctggattgtatggtgagaccttgcattttcattgcaatatttccagcagctagaacaatgtcttgcacatggaagacactcaaaatatacctgttgaatgaagggatggaatgaaagcgtggttggaattttgcaagttccgtcactctatgctcatagcaaagagactgtggcacatcctgttgtacagtatatcattgtgagcattgagtatatcattgtgagcattgagtatatcattgtgagcactgagtatatcattgtgagcgttgagtatatcattgtgagcgttgagtatatcattgtgagcgttgagtatatcattgtgagcattgagtatatcatagtgagcattgagtatatcactgtgagcgttgagtatatcattgtgaaaattgagtatatcattgtgagcattgagcaaatgcatcactgtaccctagcctgtctccagccagccttcggcatggcctccactagtggattattatatcttacttttacctaagttattccaaataggggtttgttttttttttttttttggcatgatgtgtgtgactctagagataaaacaagatcagaacattgtctttccatgaaacatacgggcaggtatgcatacacagctctctttgactctgggtgaccacagaagccactgtcatttatttaggggcaattcctcttagctacaacccaccaaataatttcgctgtgcttctataattttaatttgaaaaagaagcatcctcccaagagttgagtcctgaagagtgtcaagcactcagcctcagatatcctatacattaaatgaaagatttggaacaatggctcaaggaatcatctggctcattctaaacatcctatcacctgtctctcacccacacctaggcctagctcctattcatatttttttactatttgggaccaaatctagtgtattttcctccccttggagttctgaggaggtgctatgtttcttctgtataaatcacacaaacgcattccaatattagtacttaaaaaatgtaagactctagtaggccttccagagaaacagacaatacagaaataatgcataatatttatattgtataatatagactctattaaaatatataatgttaggtaataaaaaggcaaagtataggacaatgctgtcccatagaagatttcaatttctagcagttacattaaaagtaaaacaaaagcaattaaattaatttaatagtatattttataaaaccaaatatatccaaaatatatttacttcaacatgtaatgaatataaacattaaggagatattttacatttttccctacctaatcttccaaatccttaaaaatctttgaaattcaaatgtatttacacttacagcatttctcagtttggaagctaaatgttccaaggttaaagagaaatgtagttccatcagacaatcgagttgttttaacagagcaatattttacattccttcagttttcaaatttaaattggctacagttaagtacaactaggaactcggttcgtcgcttgcattggtcacatatcacgggctcaatactggacagcaaagtacagtataggaagttatgttgcagggagaggctgtttgagataaagaagtcagggagatcttgtgtgaagatgacactcgagcagagacgtgaatggaatgagagcgggaggctgccaagatgtggggaaagagcattcccggaaaggagaaataaaaagtgcaaaggtcctggaaatgggatcgtaaacatccaaacacacgtataaccttcaaagctgtgaccttgtgggctggggagatggtgtctatctgcttattctaaggatggtacaaaatctttttggtatctgggacacaaagttcctaaaatatgcactacttctcctttatgtcgttcgttggagcaaaacatgagattcctctttgttattaaaaaaataagtaaaaggagcttaaggctctgagtctggacccaggattatccagctgtgtccctccagctctgtgatgtgcaccagtaaagagaaacgacaagaacacaacttctagataatgccaccttgcagaccgatgctacttgctgtcgcctcacccgtgccctggagaagggctcacggtggccatctgcatttagctaatctcagtgttattttctctcggcagttttctggacagctgacaccttcgacagtgatatgagaagtaggctcccaaacagcgctgtccagagtccactcagagaagtcgagcaaatggatgaaagcgtccttatcgtcgctttttcttaggcaagttagacagaggtgtgtacgctgctgaataatctcagtcagggacagaaagtctagaagggccaaatggccaagagctgaaaggtgtctcaagtgggccttcccctccagggagcaggaaggacacggagtataggggagaaggtcaagggacaaatgctcccaactccgtgcatatggaagtccctgccgtacccacactctgacatctgcatacaaaaagcaaatgccaagtgtgtgcacagtatggttgaaataaataagaaagatagaagggtttaaaataaccaaaatagatttggttagagtgattggttgaattttttctactaaattatcttaataatttgcattagttagaagtcataaagaaacaaagtttgggctttttaatttagggttagccctgtttagtctttcagctcctctgatccctacagaatccccagtgggccttgagaaggaagaatccagaggtgttttgctcaggcctgactccaacacgtctcctgaattaaagccccataaagataatattcagccttaaaaaagaaagaaagaaatattgccatttatgacaacatggatggatctgaaggacattaggctgagtgaaataagcaagtcacaaaaagacaaatagcacatgatctcacttctatatggaatctaaaaaagtcaaattcataaaagttagagttgttaccaagagctgggaaggccagagtgggaagctgttggtcgaaggatataaaatttcagttaggaagaataagttcaagagctctattgtacaacacagtgactacagttaataacaatgtatcgtatgcttgaaaatccctgggagaatagactttcagtgttctcaccacaaagaaatagtaggtagctgaggcaatacgtatgttaatgagtttcatttaaccatttcacaatgtatgcagatttcaaaacatcatgtatacaccataattatatgccatttgtatttgtcaattttttttaaagcctgtgaggttgagaatactcctgcttgtttaccaggtagctccacactcaaaaaatatttattgaatgaatggccaacatcgtattgtaagtcacagcccaaactaccagccaggagaacaaatgcatagaagaagaaccgtgcgctgcagggagaagcagagggttttagaaaatgagctcgcaacaaaaattagccaggagtggaggcgggcgcctataatcccagctacttgggaggctgaagcaggagaatcacttgaacccgggaggcggaggttgcagtgagccgagattgtgccactgcactcgaggctgggtgacagagcaacatcctgtctaaaaaaaaaggaaaaggaagggaagggaggggaggggaggggagggggggggaaggggacgggaggaggggggaggggaggggaggggaagggaagggaagggaagggagcccctgaaggcatttctggagtcagctgaggaaggaggttccaggcagctgctttgaagtttatccaatgcctatggatttttaagtccagggacaaaagggactggggacacaataacacctgccctcacaggttcaagatgcttttaactagcatatgtgtttgccctgccattcggaagctaaaacaagacaggcagtggacccagccccatgccctcactgaccatccagcagtaaagatgagcacctggcaccctgcatggggacacgcagctgacagatacagggggagtgccgagccacgcctccttgctgcccttgggagagatctgggagagagaagagaagcaaatgatctctcttgaccctccagtcagatagtatctttccatcctctggcctcccatactaccatctaaagtgtcatcaggtagaaggcagagcagatgtccttggcccttccagaaggaagcattcagctcagtctgacaaagaactcccttgccgtcagtgctacacgcaggatgggctgcttctcaaagccaggtccctgtcccagccttaaggaccatgtctgcaatgtgacagaggaaaaatctccatttggaggaggcttgaacccgatgatctacctttctaataacagggagctggcatctatggccaacaccaactggcctgccccagcaatggacctggatacatcatactccactccaacctctggactcaaaagcctgcgagtcctttgtcccctggctgtggaacagcctataatttatcatgcaaacttaggacactgttttttgggttttttttttttctttaattttttttttgagacagagtcttgctctgtcacccagggtggagctcagtggcgccatctccgctctcactgcaacctctgcttcccaggttcaagtgattttcctgcctcaccgtctggagtagctgggactacaggcgcaccccaccacacttggctaatttttgtatttttagtagagatgaggttttgccatgttggccaggctggtctcgaactcctgacctcaagtgatccgcccaactcagcctcccaaagtgctaggattacaggcatgagccactgcacccggccttaggacactttttcaagtgaaagacgacagtaataataacaatagcagtagcacaacagggcagataaggaggtatagtcaccatgactagagtgcactcttagcaaaaatgcccagacttatggtgggatctataattctaaaccacaacatttattttattcatatttttatttttagagacagggtcttgttctgctgccttggctgtagtgcaatgggacgatcacagctcactgtaaccttgaactctgagctcaaaaaatcctcctgcctggcctcttgagtagctgagactaccggcttcagccaccgtgctggctaatttttggtagagatgggggtctcactatgttgtccaggctagtcttgaactcctggcctcaagcgatcctcccacctcagctttccaaagtgttgagattacaggcacgagccaccgtgcttggcctaaaccacatttattaacatgctaaaaatctgcctggtaccattaaagactgaagcctttcaatgaatatagcaataaatatagcaaggcactatcacataaaaacctgtgggctgggaattctggtggatatggaatacttaatgagggtgggagaattacagagaaatggaagtcctctggtttgaagagcaggagagaagtactgagaaagtgagagtggtaggggacaaatcaaattgtatttcttttttttttatttgaaatggagtttcgctcttgttgcctagtcagtgcaatggcaccatctcagctcactgcaacctccgcttcctgggttcaaacgattctcctgcctcagcctcccgattagctaggactacaggcacgcgccaccacacccagctaattatgtatttttagtagagacggggtttcaccatgttggtcaggccagtcttgaactcccgacctcaggatatctgcccgcctcagcctcccaaagtgctgggattgcaggcgtgagccaccgcgcccggcctcagaattgtatttctgtagatatttttaatcatccttaaaataacactaaggaaaactcaactcttcataaacgtgattgattttggggggcggtttgcgggatgtctggaatagaattgggggagataaagctcctactctactgtcgcctcacggcaccatcaccaagccacacctctgtgctggcactgcctggatttactatgagccacccatgtgactaagcacatttctaaacatctgacgctcagagtcctcagtctgtaaagccaagcacccagaggcctttgccactagctttccgtgtagcttggaccttctgtgacctcactctcctgttgacctacagcaaaatagctgacgtcatgccaagcctcgcagacctaccagagtgattcatttaataatatttgtaatctttgaaagatgaggttgctccataaaagggttagaaaataactgtgacttttgtaatgtgttaacatgcatacctaggagtctctcctgtccaaacaccattataaccgcctgctctcttactttctttcactggcttcttattttttttcccctctggggctcctaaagtcagactcacattggaatggtttgcaaactcccgtctttcctgattgggtccatctgaatggagccgtcaccaatgtcttcacaaatggcatttccattaacatttctatttctgtccattcggggcacctaaagatttcccaccaagatttacatcaactattttaagaacgtgcttttaaaaagccaatgagtttgctaagtttaaatctgactttctcaagggatgcttaaaagaaatatacaaagtttttttaaaagaacctttgtaagttcaaaataacattccaaaaggagtcactaggaaaacattcaagggaagagaaaaaatttttttttgcatttgtggcagacctggctttatcttaatgttctatgtttgtttttcgacgcagaaaagtcaaatagccataagagtcacaaaataattgaaagaaaaatggcttggtgcttctcatgtctagaatatttatagcagagggaggagctaggctgtgtatatccattattcaacaggccaggtaaagacagaagattggccaacggcagctcaaagacagagccctggggattctcttaggtcttatggaagctgcatcagagctattgctaaactatgtcaactgtaactttccattagcctgatgacctgtgatctaccaatgccacaacatgactggaatgctcagacagttaccaaacaggaagataagccatgggtaattatttcaatagaaacttagagttgaagtgattgttcctgtaagagtctattaattagaattagattttgctgctaaactaaaaaactctcctaatagtggcctaatcataaaaagagtccagaggtaggcagcctgtggctggtgtgatgtctggtatggtgacaccaaagagtcatcagggacccaggctctgaactgtatcctctgccaacttgagcatgtggcttccattctccaggttacttcatggtctcaaatagctattctctatcatggctatctatcagaacggcacacttcaagtaggaggaaagagagaaaggagggaaagtgtggtctcctctattttaaagagatttctagaagccccgcacaacacttccattacagctcattggccagagcttggtcacataacaattaccagcccaaaaaagacggggagctgctaatttccacaagtacccatcagtctctttcacaaatagcaactgtgcttactgagtcttttcgtgtctttcagaagcacccgcttgcctaaatccatcacttcatactggaaaagcctttatgaacatttgctcacattaggtgtaaaaaataatccagaagtttaaagagaatgctgttttccatgaactgtaataaatgataagtatttaaaccttaaaatgggttgggtgtggtggctcacgcttgtaatcccagcactttgggaagccaaggcgggtggatcacctgaagtcaggagttcaagaccagcctgacaaatatggtgaaaccccatctctactaaaaatacaaaaattagctgggcatgatggtgggcgcctgtagtcccagctactcaggaggctgagacaggagaattgcttgaacctgggaggcggaggttgcagtgagcagagatcacaccaccttgctccagcctgagcgacagagagagactctgttaaaacaaaaacaaaaacaaaacaaaaaaaccttaaaatggtaggtaagagtatcttcctgtgctttctccagaaataaataagaaaaaaaaaagtccatgttataaatctaataatgatatgttgtcctaaatttacttttgcaggaaaataagaaaaccattagttttccagagaacccacgcttaccctgacatgcttacagcattcatcagcagagatcctaaggtctccataattctatatagaagagttcaaggggtaacagtctggttgggagggcagaagttagggggagttcgaggtagtaaaattcttcttgaagttgcatgtctaaggcaagtatggtacccatgacatgtccaaaatctgttaatttcaagaaatatttcccaaacttagtaatcgcccctcccatgaggaagcagctttgccacaaaaggtagtcttgtgctgccagctttccccgtgatcctatacgataaatgtttacagagaaggtgccactaacagaacggagccgtattcagacaccattctataaaggggctgctttttcctggcagcgtgcaagattcctggcaggttccaagatcttgactgataatgtgaagtgggtcttctggctttaactatttcttttcattttaacacaaaataagggtttctttacaccaaaatatataataatcaaaataaagggcttatttgagaataactgtgtccattatttatacactatgggaggaactatgtgccaggcacaaagctgttaacttaaactatgatctaccacaaactaccaataacacggcactggtgttatctaccacaacggcttcagtgggcaggttgttgattcagttaacgggaaggtgtttccattctggtcttttctgcctcctcctcttaagcctagagccatgcaacctcatgcctacaaacaggtttaggaacctcctgaaatcgtgtgttaagttctgtgtatttgtgtgtttgcattgggagcaggatgctcgtgagattcccagagaggtctgtgattcttaaaattgctgccgtaatattgtatatttcagctaatgcagatctcctaaagagcaaacctgaaggttgcctcttttctccctatctgccaggggacaaggagaggtgtcctgggtagagagaacaccttgtctacctggtaaactcctgcttagacttattatcccagcaccaaatctgtcttttctgtaaagctttctccctacttgtctatgaattctctgaagctcagattgacattccagatacagacgaacgaacagatagagcctctccttttggttgccagttttgcattattcacggatctacttctcttctgaataagattagtcttttccttaatttggggtaaatattaattgcagcgcgtgaagttgtggaatgtttaggcttcaaaacaaacaattctaattcattgaactttgatccatctctttctcttttgtcttgcagattccagtgctgcaactatattcaataaatgggccttgttcaaatcctgagtacaaatactgtcttctctttaacggagctgtttcatgcttctgcctttctgtagaaggaaaacaacgtccattctcaggcttatctgaatctagcaccacttttcacaagttatttttgcttcaagctactttatgtggttctctattaatttcctatctccaccctcaacagtaaggagatactaaaaactgtccatttggttccgcttgtgggattttactgatttttaattttgcaatactgtcttgcatattttaaatctgcgtatctctaagatgactctccagagctgatgaattttctcttccatgctgatgagccagccatgggagagtggaggagtgggggaggaaagagttactgtctcgcgagctgtgagtctgcctgcccacagcggcgttttggatgagactcattatttgtggaaatggtgtgttccacaggcaaaaataactttttaaaaaaagaacatctctgcactctcctgaagtcatctcaaaatgaattcaagatttctcatgaaatggagaaagctttctgatggcctgaatggttccttgtgtacttgaccatgccacgttaaatctaatctaggtaacattagggtccagaaaaagctaatagaggcttaatgatgaggtaatgagcacagaggtcaagggtaggaaacaggttttctatttggagcctcatagccatgggaaaatctcagttgagaaccagaaagaagcagaaaggagcaattgaagtagaagaatatgctccctttcctttacctgattttaaattaaacatgaaggacaccacgttttggataataacttgtgttcacatgaggacctgttaaggaaaaaagagaaaaaaggaaggaaagggagaaggtaaataggggagagaacaggtaaaggaagaattgacaagatgtctgaaaaaaaataaccaggccgggcccagtggctcatgcctgtaatcccaatactttgggaggccgaagtgggtgaatcacctgaggttgggagttcgagaccagcctgaccaacatggagaaaccccatctctactaaaaacacaaaattagccaggcatggtggcgcatgcctgtaatcccagctactcaggaggctgaggcaggagaatcgcttgaacccgggaggcaaaggttgccgtgagccgagatcgcgccattgcactccagcctgggcaccaagagcgaaactccgtcaaaaaacaaacaaacaaacaaaaccccagcactttctctgtgccaggcactgttctaagtgctttacacttattaactcttttacattatgacaattcacaaagcccacattattgccttctctgaagaagtaaagcacagagaggttaagtaacttatccaaggtcaacacaggtggtatgtagaggaactgaaattcagactgaagcagtcaggcttcagagtctgtgtccttaaagacaatgtgatggcagttgtaactgagggactgggatagccaacctctcctgtccacagaaccctgttccaaatcccatttagagtcctcagatccccactgctcaaatcccttctctgtactttctacccgtctgctcctgcctgtacgctcttattaaagtatttctgaatgcctagcttggctggtcacccctcctccaggtataacccctgcctaaatcccctgacctatgagacctcaagtcctgtccctattgggcctgacacccttgatgacacggtctccagtgaaccagccaaagcattgtttttccacagaccatggcacctgcaacagcacctctggcctgtttctcaccaattcatctcatttgcgttccaagctgatggagtcccaggtagaatgcagcaagatgaacatgtctgaaccttaatgtcagcatataggggttcgacagacagctactatgagagaatatgcaaagtcacatgaaattgaggtacttaccagcggatacgtgtggggtggagttggaggctgatgctgaatgaattcagacactccttgtctcatcgctgttgaaaactagaagtcttcactaagccaagaaactccctggggcttaagttctagccttagtagaatgacctttgcagatggaaataacagcacagaactcttgaattgacgcataaatagttccaaccctgaatatcctccttgataaaccacatgatattggaaatttttattttgtaaacaatacactccaagcagatttccctccatagaagttctaatctaatgacaagatttgcccctagttgagagaaggggacagtagggaaagccctggacttgaggttagttgcgttgggaagtgtagtggttacaaggctgtaactcccagagccgaccagcttctgggagtgttgggggcttctggctctcagctgaatcctattcagagatttgctctcagctaatgggaatcacccaagcttacatcttcttcctaggaacacatctatccaataactggttctggggatgggagaaaaaaaaaggcctgatctcatctctttaaggcaggacaactctgaaggattatcccagatccagagttccctgggattcagggccagaactagggtgaggtgagtgaagaacttgactgagatgcgaaatttaagggagaaccaaaaaatctcaataaacaagcaaataaatatttaaatcaatattttaaaaagttaatgcaaaaagtttataatagagtattaaaattttgtgtgtgtgagacagagtcttgctccgttgccaggctggagtgcaatggcatgatctccgctcattgcaacctccgattccctggttcaagcaattctcctgcctcagcctcccaagtagctgggattacaggcaagcaccaccacgcgcagctaatttttgtatttttagtagagacggggttttaccatgttggccaagatggtctcgatctcctgacctcgtgatctgcccaccttggcctcccaaagtgctgggattacaggcgtgagccaccacgcccggcacaaaatattttatagggctgtgggcatagtggctttctcccgcaatcccagcatctttggaggccaaggagagaacatggcttgagaacaggcatttgaaaccagcctgggcaatatagtgagactccattgccacaaataaaaaaaaaatcaaatcaaatcaaaaattggctgggcatggtggtgtgtgcctgtagttccagctactcaggaggccaaagttggagcatggcttgagctcaggagttctaggctgcagtgagctgtgatcgcaccattgcactccagcctgagcaacagagtgagacccttcctctaaaaaattataatcataaatttttttaaaatgtggtaaatgcaaaccctgacaggatggggattagggtggggcaagtgaggtcagccatgtaaatacagggttggattttgccttttatttgaaattttggttctttgttcatcatgatttttttttacattagtttaaacgtttgaatactgcattaaaatatgtatcttgattactgagttttctggcaccctgacattttgccctgaggcgagtgcctaataggtcttactctgcttgaatctgctgagacctcgatcggaaacacgtcacagtttaacttctcctcatgctctatcctgctttcctcactcctttgtaggaattatttccaagccattccctggaaagcctcctgcccccaaacccaacattggcagagtcacttttctaggggcccccaccgaagacagggagattacttggtagttttgaaagtttatgttttagacaaagctacatttgaagctcagccccctgacctaccagaagtgggacaaggcatgcagtttctgaatctcaattttcctctattatcaaacgagaaaagcaattcctccctctcatttaatcctggagtgctaagaggagtaaatgagctatcccaggcaaagaactccatttagtggtttgtagcaaataacaggtgttcaggaaatgttattatcccttcgtgtgtttcagctttgcctttcctggagcccttaaacaggctgaagtgaaaagcaccatgacctgtcactacaagacgagaagcctcaggagaaggaaggagatcccttttcattggttttgccgagtttcccgagctccatcctcctacagttaaatcaacactctttatccttagactgctgataatctcaccaaccgcttcctggtaagatctgtaatgcgtgaggtcttccttcttagttgtttgcaaacatcagtgattagggacaattagggactggtgtgcctgtcattcttctcctttcagctgaggaggaaatcctcatgcaccgttatcgggagtgagacttcatctgtcagctgcagtctcaggaatccacgggttcattcagtcgcaactctaatctcactaactttatctgtgttcctcaaatgccttagactatttgcttcccactgatagggaaacctgacatctcattttctcagtgtccagacaaagattcgtacatagcaagaaactaagataggtgttacagaacatggagggaaccaggaaaaccaaatagaggacccccttcatggggcttccaacacgacaataggcaaaagagaagaaacatacatgtaagagacaagcaaaacccagaaccatcacttatgaaggatgtcctcatcaccctcttttgctgcctgtcaaaaccggtgagggctcatatgacaccttaattatgaattaatcttcgttcctcctacaccagcacttcccctcaccccagtcgaagccatctctttatatttccatagcttaaaatgctatttttggttctagatgctttgcctctagatttggatactgcatccatattgttgtatattttttcctttctatcttttccacaatgttttttttttttaacttttaagtttaggggtccaagtgcaggtttgttacataggtaaacttgtgtcatgggggcttgttgtacagattatttcatcaccaagatattaagcctagtacccattagttacgtctttcttctcccaccctccaccttccaaaaggccccagtatgtgttgtacctctctatgtgtccatgtgttctcatcatttagctcccacttataagtgagaacgtgcggtatctggctttctgtccctacgttagtttgctaaggatgatgggctccagcttcatccatgtccctgcaaaggacatggtcttgtccttttttatggctgcatagtattccatggtgtatatgtaccaattttgctttattcagtctaccatcgatgggcatttaggttgattcaatgtctttgctattgtgaatagtgctgcaatgaacatacacgtgcaggtgtctttatcatagaattatttatattcctttgggtatatatccagtaatgggattgctgggttgaatggtagttctgtctgtaggtatttgaaggatcaccacactgtcttccgcagtggctgaactaatttacactcccaccggcagggtcaaagcatttctttttctccacaacctcgccagtgcctgttgttttttgactttttaataatagccattctgactggcgttagatggtatcttgtggttttgatttgcatttctctaatgaccagtgatgttgagctttttctcatgtgattttcagccacatacatgtcttcctttgaaaagtgttcatgtcctttgcccacttctttatgtggttgtttgtttttttcttgtaaatttatttaagttcattatagatgctggatgttagacctttgtcagatgcatagtttgcaaaaattttctcccattctgtaggttgtctgtttactctgttgatagtttcttttgctattccacaatgttttgtgcaagataagtgcttagcaaatgcttgtaaaggaatgcctgcaccaggaaagtccaatagctatgaataaagaaagaaaggacaagttccaggggaggtgatttttttttcattttcatttttttagacagcttttaaaggaatggagtagcatgttcttctggagcaggagttacaaattggacctctaagggccacattcagcctatccacatggttgcagcactgacagagtgttttgaaattttaaactctgaatacttgtagataacatatgcatgccacaataaactgcatttccatcacctcatgctgctcttggcgtctatgacacatgcctgactcacaggccatttgaattcgagagtctggctctgcagcctgctgtctatagcatttccctctccagagtaagttctccctggccaaagcatgttgaggattaggtaaatgtgtgtgtgtttctctaatttctctagtcttcttcttcttctcttttttcttctccttctcctttttcttctccttctccttctccttctgcttcttctccttctccttctccttcttcctcttcttcttctccttctcctcctcctcctcattcttcttcttcttccttcttccttctttcttcttcttcagacagagtctcactctgtcacccaggctgcagtccagtggtgtgatctctgctcattgcgacctccacctctgaggttcaagtgattctcctgcctcagcctcccaagtagctgggattacaggtgcccaccactacactcgactaatttttgtatttttagtaaagacggggattactatattggtcaggctggtctcgaacccctgacctcaggtgatccatctgcctcggcccactagtcatcttcttaaatgtagattaagaccttttatttctaggccaataccagatctgggaaaaaacatagcaatcattcagggacaaccaaataacaaggctttattccaattaatcctcacaacaaccttgaaattaggcattatcatacccattttacatatgagcaaactgaggctcagaaaagttaaataacttgcccaaagctacaagagctgggaagcatgggaaacagaattcaaacgtagatctgagtgcttcccatacccttaatcttctcataatttggaattgccagggaggcaagcaggcatgtagaacgttcatttccacaggcagagttgcagggcgagatgtgacccgtgttccatgacacgtgttctgagcagcacaggggtctgtatacaagtaattcctgtttatctgcagcaaggcaggcaagtcatgtgcagataatccaaaaatagtttctaatttttcttgggataaatataaatttttggcaacaggcacccctttcaaagtgtgttttgattagagttacatgaaaagacatttttattctctgaggatgtgccagctaatgggcagaagggaactaagaagagtgccagcctgatctcccttctcccctccaataaaagggctgtgtacggtctacagagccgctggtgaaagacttggggtggaaatacagcacctgggctccggctgactctccaccactctcgaatgcaaaacccaactcaacactcctctttttactgatgaggaactaagatcgggttgtgaggtgtcttggccaagatcacatggcaaagtagtagagaaatggaattcagaatctaggtcccttaacttcctcttttttcaatataaattctcctttctgattttaatgtcagacagctccaaagtcagtaatggccaggagctgagacaaagagatgtttgcatataattcaaagtatggacccaaaatatgagagacagaaaatgatagttgtgcaaatctgttctaagcccagaagctgggcttccatgaatacctctcttctgacaactcattaggaacctggagacagtagagaggcaatctgtgcagagtagacggagctgaaccatgggggcaggcagacctgtgtgattgtggacacattacttaaactctcttggctttttctcaactgcaaaattcaattactgtgagaattcatggtgagcatagaagcatctggcctagaaaagcctcattgcaaatggatggtcttgttcctgggactcaatgcaaacaaatggtcagattcagtccctgtggctgaatctggctcctgttgagtgatttattgattagatttattgatttggtgatttactggcagatctccaaagtatctccttctaaacaaatgcaatagatggaagagaaatcaatatattagcatggaaaggaaaataagatctatccttcctgaccctcaaactcaaaacctatactcttctgtcccacaatcagttgtaagagtggaaattgtgacgtagtgggcagggaatgtgtgaaaggaaagaagcaggaaatgaagcaaccctagggcctcctcttctgagtgcccaggctcaggtagaccaaggttgaccaaagttgcccagccagtgcaaagaggagggtcattctgcccagaaaagacaaaccaatgagcactcatgtttctgcctttaagatgagacctgagaaggccaaaagtttgccattagcatgttctttaactgtcatttatttgactttagttgagacttaggaatgatcggacaagatttagtaaccccattttatagataaggaaactgaggctcaaggaggtgaaataacttctctaggtgtacacagcatgtaatggtagagctgctattagaacctgctttactatgaggaaccattcatatgccttgtaactgtttaagacagaagctatatctcattcgtctttgcatccttagtgtctagtagacaacagggcttcggtaagcagttgctgaaggaattaatctcttatgtattgtgctaccatgcatgtatttgagtaagtccagtgttataaatcatctttctatctcacagagcatgttacctcagaaaatctctatgatcacaaaccgagccaagaataaattagacaaatatttatttagccatattaaagacagtctttccatacaaatgttcttacataatcataatttatcaatcatttaaaagtcaactgtaagcctggtattaaacaaaatcaagaggcctgcctgaattataattcttcatgaaaaactgaagttgcttcatccagaggccttttttgcatagtgagatacatttgacataattaggtgggaacctgataaggagttgaatcaactggggatgtttttggaattaaagatgccaatttcagaatttaatctgtgaacagctctcagtccatgatttcatagttttctaagatagcatattttggacaaaggcagttctttgtggccaaaaaaaggtcttttgttccttatatgaagataactctgtccgtccatcatgtttgagcccttcacccttgacttgtatttgcacctatgtgtgattcttcacactgctccattctctcacctgcctcactgcctatgaacacaagactctgggagcaagtgtgggaagacaagggggagaaagggatcagcagttttgcagcatgaaacagctgacctggcccttgagcatgggatctctaaccccatcactaaacatgcaagttgataagtaggatgtagtttcatttcctgattctatgccattctgtaaagaattagaaaagtccctgattgacattctagtggggaaagggggaaggtggaaaatgagaaagtacagaatcatcagaggggtatattagtttgctagggttgccataacgaagtatcgcagactggatggctcaaaaaacaaatgtgttttctcatggttctggaggcttcaaatgcaagatcaagacatcagcaggattggtatctcctgaggcctctctccttggcttgcagatggtcaccttctcactgtgtcctcacatggtctttcctctgtgtatgtgcaaccctggtgactctgtatgtccaaatttcctcttcttataaggacaccagtcaggttggagtagggacttaatacaatgaccttaacagcttcattttaacttaattacctctttaaaggccctatctccaaatacagtcatattctgatgtaccaggggttaagacttcaacatatgaatttggagagggggcacaatgcagcccagaacagggaggaagcgtcaaaaataccaaaatcaagcttcaatttcagcacagattttctcaagacatatttagacattggacatgggaaaatggaaagctaactatgttttctatgagcagtcatatgctggtaaatgtttaacaagcatcagtcagtggcagagcagggagccatgatttgtagtgtttgccaatttcagtggtgtaaatactcccaccaccatctattttcagttagcaatgtggcatcactgaacacagagttgggaacgcagattcacagagattgaagcagttgaatctcacaaaccagtgggagctggatccagcatacctgctgataattaaaatgcagagtgatgtcatggtgccctggcctggctcccccttcccacagatgcctctagtgtgaagtctccacctattctctacaagatactggatctctaatctggcaaactaaagatctataaatctaaacattcccctttcccttcatttggacctgaaatatttaagtaccaatactcaaaatccttgatagagcccacctcatctctgaatactggacaagtcatctgttcaaatgattgtgaagcaaagcagcaggatgtcaaaatattcatcagtcctccaaaagggaactgatctgacaaatcaaagaaaattacccccattttaataacagttattaaaataatcacaggcaactttatttctaatacatattttcaaaactattcaggaagatttcacatttataaaaatggtcccataaaggaagcaatctgacatcagaaagtatttattagcaattttaaagtgacagataccttttaaaatgcagtatatagcaaatggattctgtctaaagtggaatgatttaattacagtgcaagttcaaaaagtttccatgtaacttggcatatgagataaacacgataaggtattaagaagatgaggaacccaaggagaatgatccagaagatctagtagttatgtgtaacaagaattcccgagcgatcagagtattcaaaagattaacagtcaaagaaatagaagaaaattattcctgaactaataaagacatgaatcttcagtgtaaaggattcaccaagtattgcacaatgaatgaactgaaacacacatccagacatcttttgttttccccttttttttgtttaaattcaagctttagggagaaaacaaatcccacaagcatccaagtatgtttaatatttacccacaaaagaaaaaagtcaattccacatcaaacttcttcttcacagtacaaacaccggaagtcaactctacaaattttagataagaaaaagccatgtcagagggagatgctctcagacgtgcagagactttcaaacttcaccagtacatcagttcctgcaaaatagaccagagaaggtgcttcccgcaaaataaacaggtaagcaaaatctaaaaaggtaatgcaagattgaagaaggcaaagtgtaaataagaacagtgatatttagactagagggaagtttcatgtttttttgttaaaatgcttttgaaacgaaatgcaaatgtaaggacaatccttgccaaaaatactgtataatggaaaaataaatttttaaaggctaattattttcatctggatttaatattcttggtcatttcaatacacttaagagacatcattaaccaattccttcaaaatttaactcatatctcacctctgttccccattcttatttctaacaccccagtacaatccctcattacatttcagctaaattacaaagataatttcctgacttctctcccagtctccagttttacacacttcaatccaccctgcacagattaatcttcttagaacactatttttagtatgtcatttgttggctcaaaatgtatatacaagatgaaattcaaacttgccagcttgttattcaaagccctctaaagtctgccatgatcctacctttatttacaggcttatgctgtactacttctcaaaatgaactctccattccaatactgtctatctttccaattgccctgaaccttttttttttttttttgagacggagtgtcactctgtcaccaggctggagtgcaatggcacgatctcggctcactgcaacctctgcctcccgggttcaagcgattctcctgcctcagcctcccaagtagctgggattacagacacaggccaccatgcccagcttatttttgtatttttcgtagagacatggggttttaccatgttggccaggatggtctcgatctcttgacctcatgatccacctgcctcggcctcccaaagtgctgggattataggcgtgaaacatattttaatcatttcaccttctatacctttctgtgtacacatttgaaacctcatttcacctccttccacttctaccttccctgctccaacctccagtttcaataagtcgttcctttctcctctttaaatgtggtctagcccagtccacaaagaaattttccccttcagaatatccagggaattagttgttgtattctaatacgtaatcaataaatcctaccttgtatcattatttgccatatgtcatcaaagttaacacaattattgtgagataaatcattattttatgtaagactaaaaaagaaaaaaaaaacctttgcaaagtacagtgtgacattccattggttttaagaggttttagttttttagtgatagtaaaagatgaaaatatgtgcatttcaggttccataagacacagtaggtgttacatctattcctctgttcactcactaaatatttctttgttgcctaccgtgtgctcagcactgttcagattgtattagcaaacaaggctgatgaggcccctgcactcaagctcatattctgctgaaaaaaatgacttttaccagctcctccccagggattgtgagatcttcagagacaaagtacaaataatgtcttggactttgtcacccacagaatgcaacatttctctgttttgcacatagtaaacaccctaaatatttagtgagtgagacaatgaatgagaaaaggggacacaggatatgtatacactctattgtaaactcaggcacaggagactatacaatttgttaaaagtagttagattgtaggcctttcaatatgaatgcctttacactacttcataaaataggaaggaagagtttcaacacaggtgagttgaagcaatcctgttacgtagatgtgactgcgggaggcctcaaggagtctctgagtgaatcaaatgaatacagagaattataattagtacattattcacgttgatttatgaaattactttcttcccagttaatgaaaatagcaaaccaacagtcccttgtcattggctgtcttaagatttctggttttttactgttgatgggcctagagtccatgtctagaaattagcctttttcttgggaattcaatcagtggggtggttagtggaatgcagaagtgagcttcctaggcaggagtgggtacagactgtcaccccacagtcacatctcaatgcagttttgtctccccttcaacattatggaacctgatatgcacatattttcatcttttactatcactaaaaaactaaagcctcttaaaaccaatggaatgtcacactgtgctttgcaaattcaggaatttggagcttcttgagattgcaggatgtatcccttgaaaacagcaagggcacattgtgagtcttgattagctggggttcctcattctggaagttcatcctctttgaacacactccttggagaactgggtgaaaggagaatctcttaggctgctgttggtgctcattccttaaagggctgatatccagaatctacaaagaacttaaataaattcacaagaaaaaatcaaacaaccccatcaaaaagtgggtgacagatatgaacagacacttctcaaaagaagacatttatgcaggcaacagacacatgaaaaaatgctcatcatcactggccatcagagaaatgcaaatcaaaaccacaatgagataccatctcacaccagttagaatgacgatcattaaaaagtcaggaaacaacaggtgctggagaggatgtggagaaataggaacacttttacactgttgatgggactgtaaactagttcaaccattgtggaagacagcgtggcgattcctcaaggatctagaactagaaataccatttgacccagcaatcccattactgggtatatacccaaaggattataaatcatgctgctataaagacacatgcatacgtatgtttattgcggcactattcacaatagcaaagacttggaaccaacccaaatgtccatcaatgatagactggattaagaaaatgtggcacatatacaccatggaatactatgcagccataaaaaaggatgagttcatgtcctttgtagggacatggatgaagctggaaaccatcattctgagcaaactatcacaaggacagaaaaccaaacatgacatgttctcactcataggtgggaattgaacaatgagaacacttggacacaggatggggaacatttacctaatgtaaatgatgagttaatgggtgcagcacaccaacatggcacatgtatacatatgtaacaaacctgcacgttgtgcatatgtaccctagaacttaaagtataattaaaaaaaaaaaaaagagattttcagtgtgctaggctcagtgttaaatattggagtacatacaaagagaggcaaattcttttcaatactctcttaaattaggacttttatacttttaattgttctatctggtttttggttttgatagtcacaaccatccagtgtaatagctaggggatatctttgtgcatgtgtgtatgtgtgtgtataaatatttttattttgccatttttaaagttcaccagaatttacagattatttctatgttatacatctttttaatggagttttaattccatgcaataaggaaataaatattgcacttgcctcatgtcttcccacaatttaaaatgaatctcgtgatgtgagcccaaagtgtaaaaaccatcttcctcatagtgcctcacggattgatttgtgggttgctggatgtggctaaattgaaaaccgccctaatgggtcagggactgtgttaactatgttacaatgtttttacctttaatcctcaccagagtcaactctagaggctgggaagtccaagatcaaggtggcagcagattcagggtctggtgagggcttcttcctcatagatggcacgttatatgtatcgtcacacggagaaagggtagggtacatcttactagtctcatttaacagatgataaaactgaggcccaaagagatgaggcgaattgccaaaattcaaatagcaaaacaggtctctcaaactcagccctcttaactgcaaatccaacgctctttggcagataatgcatgtgaagagacgaggatacggtgagctggagggaattttaaagtgaatccatagaaaggatgcatattattccagaaacatcattcatacctttcatcccaaacacacaaatcaaagagtcatttcaaagagtaccaaaagaatgggatatcaaaaggatcaaacataaacgatatgtagagacttctgtgcaaacccaattagccagagaaagtgataggaaaattttaaatgtccccaaagtgtcctatttaaccctctgccctggtctatggcttgatcctgaccaaagagctccagatggaatggatagagagtctggggtcggcgtggggttgtgttttgactgcaagttggcatctcgccaggctgggccttcactctgtccccctgcatgaccctagcccactttggcttgccgaattacttaaatgttgtacattactagttaatagacacaacatattgaaagttttacaatcaaatatttatgcggctagaaaacattttacattatctttaaacagccatgtcatctatttattttcattctctgatctttctgttttgtatcagaatcagagaatttagcctatttacccagaagtaaatattatgatgaaaacattgggcggctcaaaagtagacttagtaaaatgcagaagtatttttttgccagtgtcaattgcacaacagcccctgcatggtaataaattaagaaatttctaagggatgcttgaagtatggtggttaaatacttcatggctagatactgtctctacctgcctgatcccctgatggcaggatatacctggatacatctagcaattctttctggctattcattcttttctgcaatagagagaaactctcctggggcaatgaggcagcatttgcaggcgactccagtaagggaaatatatttaatactgaatcttgggcttcaagtaagagttgatagcctatggtctgaagagtcctattggtagttaatggtcactaagttttcagcttggcctcctcctttcttgctagatatttctaacttctgaatgcttcccccaactctgtcctgtatggttgttttactagacttcaagagctagtcccatgtttgtgcacttatctcttccctggagagggtatctcctcttatcactgaatacttccaaccagtatctcctcttatcactgggttagagaaaaagaccctcattcttccttcttccttcttttttttttttttttttttgagacaaagtctcactctgtcacccaggctggagtgcagtggcgtgatctcagctcacttcaacctccacctcccgggttcaagtgattctcctgcctcagctgcccgagtagctgggactacaggtacgtgccaccacacctggctaattttttgtatttttagtagagatggggtttcactgtgttagccaggatggtcttgatctcctgacctcgtgatctgcccgctttggcctcccaaagtgctgggattacaggcgtgagccaccgcaacggcccctccttcttcttttacataccacttccaaagaacattcttaaagacataaggaaggggtcagaatttcagagggctagaaagcaccgtcctccgacgggcctcgatccccagcctctggcctgaggtgctcaagacctaatttctgtcccttacccttaacctggttcttctgtgctatttcttgggcgttcttgcttcacccaatttcctaatctttaactggactcccagtcagtcttacatctgtctcaccctcagggtgaaggctggtaacctgccccctgggggtttcttccttaccagaagcctccttagacttgaggaaggtggtgtatgggtttagggcaagtagcacctgtgtcggaatggatgctctcgtcagtagccttaggcaaccccctaacctccctgaacatcagctttttcccctactatagaagaatgatgcatgaatagtaggattgatgtaaggaataaatgtggtttatgtgtaaataacctcatactatgtttggtccagagtgaggactcatcagccaagtagtggtaactcttactcctactatttgtggtacaaatgccctgatttccttaaagattcccccaggcttgatttcctcaatttcttcctgatactgacatggtttctctaagtcattacctaaacattaactcttagtcggtgattcataactacaagacgatgtggaagatagatgggtgaaagaaaaagaaagagagcaagaaagaatgagaaaagattggcggaaaatgcaggttagaaaatccatgctttagaataaaatattcataattttttttttttttttgagatggagttttgctctttttgcccaggctggagtgcagtggtgctatctcggctcactgcaacctctgcctcccgggttcttgcaattttcctgcctcagcctcccgggtagctgagattacaggcatgcgccaccacgcctggctaattttgtatttttagtagacacagggtttcaccatgttggtcaggctggtctcgaacccctgacctcaggtaatctacccgccgcagcctcccaaagtgctgggattacaggcgtgagtcactgcacccagccaagtattcataattttaagaatacaaattcagtaaagtacaaatttttattgaatataaattcagaaagtaaagaagacaggtccctttctacaagaaaaataagacataaatgagataggaattaccccaaacaggaaagagcccctgggtcacagaaaccctggtttgattccccgagtgagtacctgagcaaatgggtccagggtccatttacacaggtctcagcttccttatctctgaaatgagacggtataaccagattcattggacaaacgcttagcaaccactcactgataacctactctggacaaattctgggcactgaggtttcaaaggagcacaagagaattaaggttcctgctcgtattccagtagtagagacagaaaaaaaagtagataactaaatgaaatcattttaataatcaggaacttaaaattaattggattgtaattatttgggaggagtgggctacttaagccaggaaggtcagagaactcctttctgccaggctgctacttctgtgaatggagtccaggcatgcaaagatctggggggctggacattccaggcagcgtggactgcaaatggccatggggtatgtgcagaaggagagggggctagtgtggccagaggtcagtaaacaaggagagcctggagtgaggttagcagggcaggcaggtgccaggctcgtggggattctaagtcagcaaggggcagagggcatgtaaaaatcgggcaaatggaggtgattctgacaaaaagggatatttacaaagttgtgggtgggataggaaaaccaccaaacatagtaggtaggacagcagacccctgaccactcttagcactgaacaaacaggagagagtggtcactgggaccacagggagggagtcaaatagagggaacttcttgactggagccctggcggggaccctgggaaacaaatgccctgacctcaccctttgcctccctccaatccccagcagaactccccattaactggacacactcagaagctaaagggcaaaggagtccactaatgcaggtcctattgaccagcctccctgcggaccccccagggtgaagagtgggacaagaggagaaggaggaagatgcagaggggcaaagcaaagctgtcaggagatagagcagccgtgatgaggtgttcgctttatgctaagggcactgggaagctgcaggagagttttaagcaagggaatacttggaactgatttatgttaaaagatctttctggctgctgtgtggagccagagtttagagaggctagatcagaagttgggagaatatttaggaggcgattacaccatttaagtaagaaatgcatgctaatgtggttcagcatgatggctgaacataaagagaaataaatggatttgggatccacattggtatgaaaattaaaaaaaaaataaacccaacttctaccattgccgtgagctaaagtgaagctttcatgcagccctaatggaaaatgagaacatatgtgcaccgtgcatgctgcaaaccccggaacttctggccagtgccaactcatgttgcttttacggtgcaaagagcattgagataaatttatcagctctatgccatttttatttataataaggagaacgaaaataaaagaattttccaagcccggcatgtagaaaaatgatttgttcagtcgacccgacaaataacaaatagtaaagtcttccagttttattgttggcattatcataaagaacaggctgtgcttattatctggttaaagggggttcgttctgtgtgatgttgaagtgagttataatctttaataaacaaataacatcggtatttttttaatttcatagtcatgaatgtttgtagaattgtcttttctctctctctctttggtgatgcttttgtcagacgtcagaaatgcttttgctctgtccccagacatggggtgtcatttccaactatagagtcgtgaggctgtttctaaattccatcaatgcttcttcaaggaccaggctacaccagtgatggcagcttaatggcacctgtcataataccaatcccaagacattaattcactcctgggaagtcccagtgtcccgtaataaacctgtgtagactattaaagttatattcttatgtaagggaagcctagcacagaacgaggtcatagagcaaagagaaccatggaaggatggtttggtccctctgcacataaaagatgtaacaaatattgtagagagaactgatcattttttgcaaaatttacgtgtaaggatcaaaacccctagtattttttaaaacaaagaacaaatatgtgagtacttcagacacatctgaggtcaaatgtcagcccctatgctcaccaaattgcttcacctctgtaagcagggctacccctagaagatgcaagggctttgcatgaatatatatatatatatatatatatatatatatatatatatatacacacacacacacacacacacatatacacaaatatatatatacacacacaaatatatatattgtatatatatttgtatagtgtgtatttgtatatatgtgtgtgtatatatactatatattatatattatatataatttatatatattttatatattatacattatatataatatatattatatatattatatataatataatatatattatgtataatatatattatacataatatatattatattatataatttatattatattatattatatatattatataatataatatatagatgggatccctgctatatattatataatatatattatatatcatatataatatatatgatatataattatcatatataatatatattatatatcatatataatatatatgatatatattatacattatataatatatgttattataatatataaaatatatataatatatgttataatatataaaatatatataatatatgttataatatataaaatatatataatatatgttattataatatataaaatatatataatatatgttataatatataatatatataatatatgttattataatatataatatatatataatatatgttataatatataatatatataatatatgttattataatatataatatatattatatatatatagcagggatcccgtctatataaataatttgagtcactcaaaatcacgtcagctccacccttgaggcctaatcttgtgccgatcccacagaagaaataatgcacaagccaaaggaagttatcagctcactaggctaccctcctgaagtctggtcatggggacccaggacaattcattaggctcaagtttcagagctcatttgggcatcttgttgatcccaccacaggacagagggttggagagtaccctgagggaaagcaacaggaacttgcccaccctatgtgagggtcccaccctatgtgacatggagtcagaacacctagccaagatgccacctctcgcctccacagttcccaggtaccacaggaagacttaaactatttcaagagaggcactccaaagtacaggaggatgcctgagatgtggcatctaggatggaggccctacttgcattggtctaaggatggtactctctctgaacctcaatttccctatccgtaggatgggaataaaaattttacctcttgctaaggttattgttaagtgttaagtgagataataccaccattcagattcctagcatatagtaagcattctctccatattggctaatgttgtactcatgtgtgtatatgtaaatacatacatgtaaataaggatgttgcagcccaatttcagaaaactttttgaagacagatgtgttcatcagcatttaactttgggctctgttcctcagcgggtgtggtgatatgcctgtcttcaaaaactactggtgagcaacctcaaatacagccaaaggaaaaaaaaagaggacacaaaaaatctttagcactattagctctagtttcacagagttctggccaagcagatattcgtctgcagggtttattttttttcttttcaaatagggcaaaaacaatacttccaaaatctaaatgcctcaaaaccgaatataattgtttccattgttataattaacttaagcatgaagcattcctcatttatattttgagtgaagccttcagaaaactcagaagcctgctaacccaggccagcatctcaggggttctgatggcagcatccctggagattgccccaccccccttgcaggggcaccacagcaaccacgaggcactgatttcatgcagtgccagcctggtctgatggaactggatgccgtttaaatgatattgaactttcccctggtttgtaattggtctggatgttttaccacaaaaaaatagttatttcccaaaggatcaccattacagagtctgaatatgtggcatttgtagagtactttagaagagaagaggtgtttctttgcactttagctttgcctgtaaatggattggttgatgtgtagggattctagcattatcatcgtcattgccatcaccaccaccatcattatcatcatcgtcatcaacatcatcatcatggctctcatttgtaggaaatctaccatgtaccaggctctgtcccgagtgttttctttatatctgtttacccacggaattctctccataacctatgagctagatatccttgcttacagatgaagaaaccaagacacaaagaacagagaggttaagttagttgcccaaggtcacacaggtaataaaaggcggagttagggaattgcattctggtgccaggctccagaacccatatcctttgccataactagcctctgtgctggtattgccaaagatgaagacttaaaacatgtatacaagatatacaagatgaagactgacagagctaccaatgactaggtgtttcattcatcttctttccaaaccgaaaccatctgcagtcacatacattttatcggatcttctaggattctcatttggtcatttttaacaaatttgctgtcaaacacactggaagatatcctagactcgtgtcttgaaagccatagacacagttactgttctttagttttaaatgataatgtaacaaaatcctgtttttattaatggaatgggttagtaccaaggtcagttcgtaataaagaattttccagaaaaaaagaaaaggaattggcaacgtactgtaagaaaagactgcatgagccaggaagcaacttagagatgtttaaattttccctgacatgaatgctgaccacccaggggaataaaaaaaaaacacctgtcccaggcaggcagggattcaggcagggtatgtggatacccagagagggaaacctgagcaggcttctcagtcatctgtcacattagaggccccatgtgtccaagagtcacacagaagccttgtgaccaagacctggtcttaggtctgtctctaagtagagaggccactgttggtgaatcagtggttctttgtcctgtgtccattttttcaatggtccaaaagtttcttaaatctctcaaaggattgagatgaaaaatcgcaaaggaaaatacacacgaacgggctttaaaaagttaaaattacttgagttcattgtagattctggatattagccctttgtcagatgagtaggttgcgaaaattttctcccatgttgtaggttgcctgttcactctgatggtagtttcttttgctgtgcagaagctctttagtttaattagatcccatttgtcaattttggctttggttgccattgcttttggtgttttggacatgaagtccttgcccacgcctatgtcctgaatggtaatgcctaggttttcttctagggtttttttggttttaggtctaacgtttaaatctttaatccatcttgaattgatttttgtataaggtgtaaggaagggatccagtttcagctttctacatatggctagccagttttcccagcaccatttattaaatagggaatcctttccccattgcttgtttttctcaggtttgtcaaagatcagatagttgtagatatgcggcattatttctgagggctctgttctgttccattgatctatatctctgttttggtaccacatgcacacgtatgtttattgcggcactattcacaatagcaaagacttggaaccaacccaaatgtccaacaatgatagactggattaagaaaatgtggcacatatacaccatggaatactatgcagccataaaaaatgatgagttcatgtcctttgtagggacatggatgaaattggaaaccatcattctcagtaaactatcgcaagaacaaaaaaccaaacaccgcatattctcactcataggtgggaattgaacaatgagatcacatggacacaggaaggggaatatcacactctggggactgtggtggggtggggggaggggggagggatagcattgggagatatacctaatgctagatgacacgttagtgggtgcagcgcaccagcatggcacatgtatacatatgtaactaacttgcacaatgtgcacatgtaccctaaaacttagagtataataaaaaaaaataataataaaaaaaaaaaagttaaaattacatatgacgttggagaaaagaagcataaaaacagtgcaattgtaaaacaggaaggtccttatcaagacaagcatatgacagctaaggactgtgaactgctgctgggacattgggcaggttatagtctgaggaccgcttgagtcagtttctataaaactagcatatctgctcaaatcttatgtgcaaaaaggaattttgctccaaaagcattcagtggatctgaatgtcccttggccatttgctggattgaatgattatttgttaagtttccttcaactgaacactgggttcctgagaccggcttcctgagagtatcgctggtggacaagcctcccaccgtgaattttctttactgttattatagctggttttaatagcatttggaatttttccttttcagacattctcacttggaatgtactaattttcatagtcagatgttggttttagctaatttgttgtagctccttgaatgggccatgctattttcagagagagaaaaatatctttcctagtgccccctaaaatgaaaagctccccttcctgactcacagccctggagatgtggggtgaggtgaagagacttagaaagctctgggggaatttctgtccactaaatagtaccaccggccttcctcctccccttcctcactcctgttgcatacagggtggtgcttcaccattccttagccataataggcatcctgagttaatgagatgaggcatgcatgatttgtaaggtcacctgaagcaggtcagggatttatgggcctccattctgttttctgcaaagcgggggagatagtaagcaaactgagagaaaggaggagttaggaaacagaacacaaccagttgcaaaaaagaaagaaagaaaaggaaaacatttagaagagaaggcaaactcccagatcacactttatgaaccagaagaggtttaagtgtataatgttgtatcaggccctgaacagagtgaatcagaacaaaacagttgctgcatccaagcatcacacaacaaacccctgttgggcagctgctttttgaaagcctcaatgtatcatgccttggtagaattgaaggatacaggacaagccagagctctcaagaaatgtgtaatctattcgcagaagaaaagacaaaagacaacaaacactattctgtatataataattcaaatacaaattatgtcaaagggcggtttattatggaaagaataatagaaaattagcaaaatagtaataaaaggaaaaatagataatgggttataaacataaatgaaaactatattccggtgctccaggagccttcaaactagtggaggaatttttttatgctaaaaagtaattgatggcccaggcatggtggctcatgactgtaaccccaacactttgggaagccgaggcactcagatcgcttgagcccaagaccaccctgggcaacatggcaaaatcccttccctacaaaaaatacaaaaattagctgggtctgaggctgaggtgggaggatcccttgagcctagggggtggaagctacagtgagccaagatcacgccattgcactccaacctaggcagcaaagtaagaccttgtctaaaataaaataaaataaataaaataaaataaaataaatagtaaagtaaaataaaataaaataataaaataaaagtaaagtaaaaaataaaaataattgatgatactttgaaaatgcaataacaggctgggcacggtggctcacacctgtaatcccagcactttgggaggccaaggtgggtggatcacttgagttcaggagttcgagaccagcctgaccaacatggtgaaagcccatctctactaaaaataaaaaaaattagccggcatggtggcaggtgcctgtaatcccagctactcaggaggctgaggcaggagaattgcttgaacccgggaggtggaggtttccgtgagccgagatcgcaccactgcactccaggcagggtgacaaaagcaaaacttcgaaagaaacaaagaaagaaagaaagaagagagagagaaagaaagaaaaagaaagaaggaaggaaggaaaagaaggaaggaaggaaggaaacgaggttgggaagaaaggggaggaaataaagtaggagaaattgacaagggccatagtatgtggggctttctatgtcacacttaggagcatggacataaccctttggcacaagagagccaaaaaggagtttaagcaggaagcagtgtgatccgccttatgatttaggattatcactttgatgacaacgtggaagatggactggagcagggaaagcctaagaggaagaagaccactcaagagacacatgcagtaaaccaggggaaaagtcaacaagagcttgaagtaagtaagaggcattagggataaataaaggaggtacattcaataggtatttagggaggagaatggatgtggcgtggtgatcgattgaggatggagagaatgcagaaacgtagattgtggccatcgtccccaaaccagtcattaggtggatacttttccccattcattggaatgagcaggaaagttcaggaaagaaagtgtgggaaaaggattaggtctgaaggaaaacttgatgagaggaagtggttaaatttggttttgcacctcttattgtcaaagagcttttgggaaatcaagtggagaaagcatttggatatatgggtctagagcacaagagaagaatttcagaaagatatacagctttggaaggagttctaagaggaagaaaagaagcagcaatgatcaatttcaagagaacctggaaaaacaaagatggataaatgtctactggaagactgggtggtctttactcacattggtactgttaaaatagagggggaaaaaaaacaagtgaaattgaagaatttgcaccctgaaaattgcacctacccagaaatgaatgacaactatgagttcatctccagacaacacacttctccattgtccatattctctatggcaaacaagtcacagcagtgagacagccatctcagatataacttggaccccgaggaaactatcattgcatggatccagtgcaaacaagcttgggcaatatgtctgtgtcatgtaacctaaaggcaagaacgaagctggaatcacgaatggtttgtatttacacactgccagaatgctcactgtttctattttacactcctcttcacccctcttaaagtgagagtagcaaggatccaggaagacgaagaagaagaggccacacaggggtgcatgactttcagcacagagaccctgctatctagtaaatgtggcccaaccgagtggctccaaatcgggatgagcaaattgtattcccttttcttgggcaggaactaggatggagaagtgcaaagagagagaggaaaggtgaaagcattgctggctgtcgggcagactcggaaggggctgtgaccgatcctgcaactgaaactactttctttatgttgtttaaatctttgtttaaattaggcaaaagtccttctacattcacttttatgaaagaaagcaggttatgttaatagtgtggctgacatgagttccatctgtgctttcatgacattaactcgtagaataatgacactggatttctggtttgttgagagtttgtggatgacccccaccactatattcttagcccctagaggttctggaccatatctgctttatctttatattccttacagtgctagaacacagtctgcacttaataaatatttctggaatggaaagaaattgagaggctggggctgcatttcttaaataggtaattcttcaagtaggtgacttgatggtacatacttcctcctccctactgcagtcaagctcttggaaagcagaggagaaatttcacaacagagttcacaaagaagattcacaggggtctgactcagtgtgcagacatgctctattggctccatttgactcttctcccccccaccccaccccccgacacacacacacttgtatgggccttgtgggtgctgggagtaactgggagtttgagagacttcaaggtagaaaggagaaaaggcaggatgcaattagaaagcatttctacattaccatttctggtcaaattgactgaagaatcttagaaataaaaaaatactaaatcttccatgctactgttagctgtgatttcatttctcattctatgtaaaaagtcaaccttgcacttaaaatcatagttataattttgcattcattttttaaagaaccctcaaattttatgagactcagattgtacaatttggatctgctcctggctgacctatggtgttttaatacattttttaaatgtactgataattgttctttttttttttcttttctttttttgagacagagtctggctttgtcatccaggctggagtgcagtggcgcgatctcggctcactgcaacctccacctcccaggttcaagcaattctcctgcctcagcctcccaagtgcctgggactacagtcacccgccaccattcctggctaatttttgtatttttagtagagacagggttttaccatattggccaggctggtcttgaactcctgaccttgtgatccacccacctcagcctcccaaagtgctgggattacaggtgtgagccaccgcgcccagcctagttgttcttatttttaaaagccaatacctttcacattacaacctggatttctagtgtctttgaacagttaaggagaatagcaatgagggcctgtgttccttctctcatggctacagtcacctagagctaggtcatggctgccccccttggatgagccacctgctaaacagtttgttgtgtgaaaccccctcctgcctacattttatcttctctctggctcactcgactcatttgagtttgcaaacctatctctctatgcatgcctgccagggcacttgccacagtgacttgctcacatccctaaatgcattttctttttctttctttctttcttttttttttttttttttttttgagacaaggtctcactctgtcacccaggctggagtgcagtgacacaatcatggctcactgcagcctcaacttcctgggctcaggtgatcaggtgattctcccacctcagcttcctgtgtagctgggactacaggcatgtgccaccatgcctgacttttgtgtgtgtgcgtgtgtgtgtgtgtgtgtgtgtgtgtgtgtgtgtgtatttttagcagagacggggtttcatcatatttcccaggctggtctcaaactcctggactcaagtgatccacctgccttggtctcccaaagtgctgggattacaggtgtgagccaccgtgcctggccccctaaatgcatcttaaatgaactaatgaaagatgaataaatgcttccctgaagttacttattcaccgatgtgtgagagaataaaaagagaaaatggacaagaggtgatactagagacaggtactgaagaactcttcatgtctcaagaagaccatgagatccactcacacaataatgaccttggtggggaaggggatttgctaagagaggaccacagggagaattcgaggtcctgagaacaacataggtgagctgtccctctgctcaccacactatcccctgtctgtgacccagcagctgacctcatggtgctcctaggaaaggagatgtgtaaggggtcaagatttaaggtggtgactctgcactgtactttgaactcacacctatggacataatcacttccattgtggctgaaggctgaggaccacagctatggaaggcagaattgaaaggtgacctctcaatgagctatccccttggataatcttctctccttcaatatgggagagaccagtgactgtgatggatgcactgttatgattaggttacattatttggcaaagatgaagaggtttttcagacataattaaagttcctaattactatgactttgagttaaaagaaagattatcctgggtaagcctgacctaatcaggtgagccctttaaaagaggacattctcagccaggtgcggtggctcatgcctgtaatcacaacactgggaggccgaggagggtggatcacctgaggttgggagttggagaccagcctgaccaacatggataaaccccttctctactaaaaatgcaaaaattagccgggggtggtggtgcatgcctgtaatctcagctactcaggaggctgaggcaggagaatcgcctgaaccagggtggcggaggttgcggtgagccgagatcacgccattgcactccagcctgggcaacaagagcaaaactctgtctcagaaaagaaagaaagaaagaaaaagacattctcctgctggccttggaaaaaagcaagccattgtgagttctaacactgcaaagacctgaattctatcaataaccagtgaacttggaaggggacactgagcttctcatgggactgccaccctagccagcgccttgagtgcagcattgttagaccctaagcagaggtcccagataatccatgcctggactcctgaccatgaaaactgtgagataataaatatgtgcattgttttaagctgctaaatgtctagcaacttattacacaggtaactaacagcaaaggagagaaagccaaaatgaaggggaaagggacagaattgcttggaatcttcatgaatgtttggagatggttggggcaggggaagtaaaaagaagggtccaaaacacaccagggccgggcacggtggcttacacctgtaatcccagcactttgggaggccaaggcaggcagatcacctgagcgcaggagttcaagaccagcttggctggtcttgatagggggaagccctatctctactaaaaatacaaaatcatctgggcgcagtggcatgcatctgtaatcccagctactcgggaggctgaggcagggagaatctcttgaacccaggaggcaaggttgcagtaagcccagatcgcaccactgtactccagcctgggcaacagagcgagactctgtctcaaaataataaaaaataataataaaaaacacaccaaaattgttctgggcaccccacatgtattctttcatttaaatatcccaactcttcctggaagtaaatatttctaactccattttacagataagacgttgagtatcccagagaactccaataattcactccaaagtacagggttatcctgatggaaagaagatctttctcacactggaggctcatgtcttgcctttgtgtcacatcacgggcttactccaagccccaggaaaagaaggtcatggagtagcctggcaaggaaaacatactccaaggtggtgggtgacattgcaggacagagcctggcagcatgccgctgctgcattagcctgctgcttttcgagcctagcagcttaggagttctgttctccttgagaacatcttctccaaattccacccctctcaaaaattttttttgttttaccaaaagtgcttggctagagaggagaaatgatgaacttctttatgagcatatttataaccatagatattccaagccataggaggtataaatttcaggatatatgtcagtagctccacactgtgatgggaaaattgaggggggctatggttattggcatttcccaaactcactgaaaaaaagaaactgcttccctgcaaacacacatacacacacacacaccacactccacacatacacacacgcgcgcacacacacacacacacacacacactccccctaggcctgcagagagaaaacaacttactcctggccagctcatctaggtcatgcagaccctacaatcaatgctggcttcagctaatttcatcccaacttgcactgaaaaaataattctctgccaagttgccatgtatctcttctcagccccaaagccttcgggataaaaatctgtttggctttttcttttttctttttttaatgttgctcaaaatagttttctctgctcagataattttgcaatattccttatcccaccaatctcttccctgtagagtacctccctgccacacacatctcaaagccggtcagagcccttccagactcctgtgtgcacccgttcccaaacctccctccactttccttcttctcattgaagaccagggggctgggggttgactgaagaccaggagaggtagaagagaaagaaagatctcaggcggaatcatgccctctcctcccatgttcatgtcctaatcccaggaatctgtgaataggttacattatacagcaaagggaatccaggcagtggatgagattagggaggataataaactgactttatgatagagtttatttttgccgtaaggttaatgtagaagagggaagcagaaggtggggaagggagcattaaagcggtaagatgcaataggaacttgacccacgattgctggcttcaaaaatggaggaagcggccatgagccaagtactcgggcggcctctagaagctggaaaaggtgaggaaatcgattttcccctagagcctccagaaactaacgcagccccgctgacaccttgattttgaccccctgagacccactttggacttctgccctccataacagcaagataattaatgtgtgctgttttaagccactacattcgtggtaatttgttatagcaggaatgggaaaatgatgttacgtaatcgctgagatgctcctgcacacgaaatcagcctatagacaggcgcccaggccaggactagatccccaaagggaacatggatggattgttcttcctcgtctctgacacatcagcaagaaggtgtctatccctgaagaccttatttacaaaatcgccccgctcagatccagagagtaagctctagggctaacccctctaatgtgttttcagcaacaggggatggggcagaggccgggaccaggacattagaggttgtccccatgagctattgtcacctcgggtctccatctgtcaccgactgatcttttaaggactcgtagtatgcaggcaggcttgtgtgtaatagacgacacccggggtccacgtgcatatgaagttgcaaataagccctaattatatacgtatacagagtggtttttatgttctgagccaccaactatttaacgggcttcttgagagatgggtctttgttttatttcattgatccatgtgcctataacacctcggccagatgcacaaataactctgggtcggttacggaatggattttcccctaaggagagactcattcgcaggcaaagtttttgagccttcccaagctaagcccagcccgagctctgacttgccccctgctccagagcccctccctatttagagcccagtaggtttttcactccaactcaggtatcttttcccattccctcggggttgtgaggtgggagcgttgtgtcgcagctggatctccagatgcgccgtgtcacatttgtccccccaaaaagcatatcctagaaaatgaaagcctttccatttccccgtggaaatgcatctaagtccagtattggagctgcgagatacagaatcgtctctgccagtgccctgagcccctcaaaccgaggggaatgcgtgggcttcggtccgtcggaagcttttcttctcaggggtccagcttatttccaaattgccccgcgtgaactgtcccgcgggcgcgcacgccctttcgcgcagcctttgcagccggctggcgggagatcccggccgcttccctttcgccggcagaagcccggccggggaagccccggctgcgcacgcccatccccaggacctcggagctcccagcggctgccgcagccccgcgaaccacctgcaagccccgcggcgtcgcagcccttccttctttcctccgggcatccgctctttagctcgcgcccctctcccagattcccgacccctggccctgctcccgccctctgtgcctcggcggctgcggggcccgccgcaaagagttaagagccggttcccgagacggcttcggcggctccgggtccccagaccccgctcgccgctcctgattggctgagcgcctgtcagtagtaaagggtatcagatggcaaagttgggaccttcataaaggcgtggtggcgattctccgcaatcgccggcagcctatgacatcagacaggaacgcctgggatgccgcgctgctcctggccaacctccgaggaggaggagggtcccgccggctaagagttaattagccccgcacggcgaggggggaggcgccagttttctggggacactggctgccactgtactcctacccaggggagctcacggagagttggatgaattctgggttgttagctgcggtcagctgggctcccgggagcctgttgctggtggagaacagggggcgcctggccaagggaccagcggcttgctgagactcaacatgacactcctggggtctgagcattccttgctgattaggagcaagttcagatcaggtagggctaaggcatttagcattccttcttaaactttcctcttctgcaattctcaactctagaactgctttccaataaatgtttcaaagcctgccaggtctacctcaactttgttccccaaaagcacattgtggaagcgaagagttttgtttgactttgggggcctttcgtgtcttccgttgtaagtgctttgggtggtcgagtgtggttgttcatctgtgaaaaggccaatccttttattttattttctctgcatctatgaatagaaattttggaggggtacattcagagggagcaactttggaaatgaacaaataagggatttcaagtttggaagctgcgtagtatcggttataatcgctgagaagatgaacctgatgttgtgtgttaggtacaggggtcacttaaaatgtagctaatccaaacaaatgtatttcccaaaaaaagtcacttgggggaagtaaaaatagcaaatttggagcacaccaagtatttaaaatgacatcactgtagaaaaaaaaagaaagcccagtgccacaaatattttttcccaaaccatctgatatttataaatagagaatttcccccaaaatttctgtgttagtggcacatggagaaacttctcaaaggacgctgagtggaggtgagtggaagggagagacgggagctctaaccgcttctccagaagggcttgtacacgcgcccatggaaggtgtctgtgtgggtctccacgtttagacaaagcaacacttgacttctgaagttatttttcagtagctctgtgtataatgttggttttagaaaactggttaacaacacactcaacaatgtaggacttctacttagattgatgacttttaggagaactctgatgtgaacattagacataacaggtgtcagaaagatgctggcataggttgctaagctaaagtttccttagcccttctacatggggccaactcagttgtttcacttgggatggatggttcaaaaaggaaaaatgtagatgctgggaggtaaggttcatctgtgactttcttagatgcccttggtttttagatgcctgtggagtcaactggagattttcttaggatcttcattgttgatgcaagttgaaaactcaagagcttaggcggtcacaagtctcactgcccctgaagctctgggatgagtccgccagccactggggtcggcagtggattaagtccttcctttcctttccatggtgaggtgaggcggttgatctgttaaccagctagagacctcaccactgcgttgtattcggtcaaaactgtaaggcaacactgccacctttctgaagaagagaggatgtagatttgttttctatgaggctgcattcatttcaaatgcttccttgccagtttaaatgtggagggtctgggggtgctggtttgtctctaaaaggatctggtgatgtacttgatagtagacttgcaaaacgcttatcaatccctccttcagctaaagtgcagtggagagggaagtcagtttttgccacactcccaacttccatctcagtggatttgtggagtcctggtgtctcctaagtagaccctgaagaccctgatcctggagcttcagagaattccagcctcactttttttaaagttgtgcaggcttttgtgtcataaggaaaggtagcttcgggaaaacatgatatcacagcagaagcaggcatccttaatcctcccgtcattgataaacagggaatctggagtctgagatgcaaacattgatagtctcttgacagacaagagaaaaaaaacaagtggaatgtaaaacttagaaaatgtaatgtttgaatggaggttattctttctggatgtaattactactatggctgtgccagcactgaggtcgcagcatgctaacaagagggcctctctttaagagaatgtcttttattttgtcaccaacagtgaataagggccttgactttattttgatttctctctctctctttcactgttttcccttctctttcatcatcttcttctcctccttctctttcaaaagcaactcaaacagtaaactcataaaactgtttctatctcactgcgaatatttgctttgatagtagatcgtggtattatgtattccattaaacatatttcaaaaaataaatgcaacagaaccattctctgattacagcaacagacccactgtgacggggtttatttataggtgagcagataactgcttttactctgaaatcatcatcgatgtcaaccatggccgaccaactttctataagctgtatttgagtgacctcgtgattaaggacaaaattgtgctacagcagcagtaagctctgaaagtttacatgtatgaacatgtttagtgatataaactcatttgagaagccaaagggtgtcctggttgagtgcgtgggtctcgggggccagactagctgggtttttcatagtggtctctgcttactagctacatgaccctgagcgttaggtaaattacataattctctgtgcctcaacttgcctcacctgaataaagaggatgactatagggtcattgtgagaattaaatgtgaagtagagaacttcgaaaatgcccaggccttagaaggctcttacaaaacatttttctattattaatattgatgtgcagtgggaccggcggttggtcagtttctctgtctcagttatttaatcggtaaatgttgaggttggattaggcaatgtcttagacccctttggtaacattttatcattctctgaaaacacataaagattgactgggaacaagtgtaactgtgattgtgctgtgtggcaattgtgtgtgaaggagaggcagttttacatgaatgtagtaatttgtgctgattttaaactaatcacatttttacagtttttaatcttctcatgttgtttattcaatatctaatcagtgtcactatcaacagttctcctccatatcaatccttgtgtcctacaaaacacacagggaggtacgtatgtgtgccacacacaggcacacacagccctcagacataaaggatcaaaagtggagagagagatccatgaatggatgttgcttctaaagaatcattgtgtttcttttgcttctctctctctctttcccacttccccatcttaaaccgcgcaaacagaggcaaagtctggcaattgccatgaacttgaccccacccccacaaatataaccttgttcagtttagcaaataaaaatacagaatgctcagttcaatgtgaatttccaagcaatagtgattactttttcactatatagcagtacttgggacatacttttctctgaaatccaaatttcactaggccctgttattctttttggcaaccctacctacaatctgagtgttttttgttgttttttttttctgagacggagtctcgctctgttgcccaggctggagtgcagtgtcacgatctcggctcactgcaagctccgcctctggggttcacgccattctcctgcctcagcctcctgagtagctgggactacaggtgcccgctaccacgcccggctaattttttgtatttttagtagagacagggtttcaccatgttggccaggatggtctcgatctcttgaccaatccgagtggtttttgatcaacactttctgctgccccatccaatatcctatcaagctcttgagattctctgggtccccaaggactccccaaaatgcaaaacttgtactttaggcatgaaagcagaaaactccagatggggtgggggtaccatgagaatgaaccctaggtcccccagagtacagccagcttatgggtgaggaagaacatgggagcttcacctctggtctctggtcgtctggcaaggaggaagataagctcagcaggcaggccggtgctcaagcagcagaggctccagaggttggagctgtagttaaaagaaggcaaagaacatgcaaagcaggtactcaagaggctgtggctgaattcaggtagtgggacccaccccactgtgttcttctactccaatagatgcaggatcaggcccctggtgcctgtaattggttgcttgtcctttcagagagggcaagggacatctcagcaagaccctgcagtcatctctctctgtcgtttctctattctccatccttcagacaacctaaaaggacgactgattcctactttaagctaaatcctcaacatctctggcactgaattttctctctcaggaattgagcttagcctaagaagtcggtccccaagatttttatcataatggacagtactgaagacattttcaccatgagctcgagagaagcccagactatctaccttcattggcaattagttttctagtttagaacaaataatttaacctacaagagtacctttcccatgatatgtaatatttatgtatgtacatataatttaattcacctttttagatctcatttttactttctacaaaatagagggttttgactggtttctatttcaagttgcttttagccctaagattcaatacttttccaagggaatggccctaaatatttttgtaaatgcttgatcaaagcattacatatgagaatacaatttaatggaccttaaaaaatgaacatattttaatttctacatggaatgtaaaagttaaaggaacatttggggtctggctcaagccacctgcttgagaccattcctgtctcctcaagtccagctgtattcgattcactcacagctcccatgcccttccctcaccatcttaatcactatagcaagaaccccaacccccaccttccctgccctagttttattcatagctcttatcactattggacagactaaaccttttacttgtttatttgcttattatttgtccataacggcagaaattattacttgtttattcgtgtttggtttttactgtctttattctctagcacctaacatagtttatagggtattttccagtcatttcatatcatctatgcttggcacagagaaggaacccattaaatatatgttgaataaataggttttattcttcctctaaagtctattcaaaaacatcaaaaacaagcaatataggtttattgttagatgtgcgtttgtgtgtactaaaactagaacaaaaaggagaggagtgactataaatacaaaagtcaaagtcatagcacagtgggagaggctaaataaggaggtaggggtgtagccgaaaggtaagaagcaggttatccctattgttcttaggttaggcagtagttgtgtccatgtgttattaagcaaattaattaaacaaaggtcatctatggctcaatgacgatagtgtgacagtgtcatgaaccaaggattgtgattaattcaattctgtgtacccaggatacttttttaaaaacatataaattctttaagaccaggaagagtggcatttgtcttttatctgctacagcatgtgacagaaacagttagcaagattgtgtcaagttggcttgaaccagattgaatgtgctctactctaattggattaaattgaagaataacagaagtgcagggcagaagcaaaatactccacccagggttagaattttacatgcttcaaaaaagccaaacctgaataggagatgctagaacaggctgcttttcatttcctttattttcatctaattagcaaggcttcccgagcatctaatgaatggtgaacaggtaccccacatctctgtccagatcaagggggaggagccagcaggtgcatttcacaggtctctgctttcctggttccattccttctgtcctgtgggccaagtcacagtgggagcccatctgggactccgtggtcttgggaatatgtttatattcccagggctctctgggcctctgtttccatattggtaaaatgactcatggtcttcacatcctcatacttctatgagggaaagatctttgtagaattattaagggtttctttctgaaaagaaggaaattagtgaacctttattcactgtgtggaaatggataactggatctggtggcatgtgagttgcataagagttcttgcttatgcgtggagtagttaaaagttttcgatgaacacaaataggattaataacaacaaccatgaccattagcccaataatagttttgcagccttacgacgttagtactttgaatttctattttattaggcagataatgcttatatgtttcagaatagctagtaagtcaagctgtcaagctttacgtaacgagatttggatcattattcttagataaaacagaaagaggtgtccaatttttgttaaaataaaatgtatcatttatccccagaaatttagaataaataaaactgttttgtgacttttgtttttccagagcatagcaaaatgaagggagaataatgtctttcttttctcctgctggtgagggaagataagttctttcttttcactattggggtacttctcttatgagtacaatccctctgactcatggatgtttgctgtattcagctactttagatcactagagaagaaattgaattcaaagtgaattaagccactgtaatattgtgagatgtatgtattgggttctcctagctctcacttggtttgtgcagcaatgattaatggatacacagaccctcaaatacttagtatgtctttatcagcaatcccttctgacacctcagtttgaactactgcattgagtaagttttcccttctcaacttgtatctccttccccttggcctcttaagtggtacgaaagcatcaaattagttgtttctcataaaatatggtcaaataactccaggcaatatcctcatttcacagatgatgtgaaatgactagaaaataccccataaactattctgccttttctatttccggaaacactctccttaggaagccaatcttgttttctgctgactggttgggctggtttttcagtcctaggtaaagttccacaaggaactttctgttatttatttgagacttactgccctgtctggagcttctaaaaaatgatttcaaaaaagttaaatccagaaaatgctgttcaacattaattgaacaatagttcaatagttctcctcaatacattatattttttgtcatttgtgttctctttctgtcctggtccagttgcataaagatttttacaacgtgataatcagagtatatacataagtttatactcagcctttttatcgttagtataatagcataaatatttttcaagcggctacatagcaacatagtttttgctttaaagactgtataatattcccccaagtgagtatatagtaatttactaaaccttttccacttgtattggaaaattaagccagttataatctttatattataaataacactactatgaaaatctgtatgcataacactactgtgaaatccttcatgtaaagaaagaaaatattttcctccctttggattgttttgtaggctactcattatttagagtaaatgcctaagtgtgggaataatggatttgaatatttatgagctgtaatgatggctagtgtttttggagcacttacaatgtaacaaacttaactttaggcctatttctatttggcgatgaatgcttgtccctactgtacaactaactcagagtaaccttgggtacttacccaatggtggctggtatctgatgagcctttcataccttttcagtagagattgaaaaggaaaatgagtaacagttgcctaatgcctttggaaacttccatgtggtctgctatttagggaccacgtgttaccaaatatgactcatgcctcatcaaaagggaagagaagaggactaggagttactgaacctattatctgtgggcacctttatcatctcatttaatccttacaaaaatgtgattattcctatcttagagatgaagaagctgaggctcaaagatgttagacaacttggaggccaggtatgaacgtatttgttccactgtcccatgatgattatctctattataacctgcagctcctttccttctttccctgccccaccgcataaccatacacacatacctgacccagtagatttaatgtgcctctttctgggctacaactccaggcatatatccaattactgctatcgtccttgatttcctaaatagtgatttatcaaactagttgtttctagtacttaacctataaattacacatgccattcctacaaagtcccaggggttttaataaaacttgactttttaaacttcagtttatttgagaaaaaaaaattaagaaatttttgaaaggcaacaagaagaagagatttgctctaagacattaaacatagttatataagaaatatctaggagttagtaccagaagtaaaacagacaattattatcagtggatgagaattgtgtatatgtgcatgcatacacatatatacacttatgtatatacgcatagatttaacctctgataacagtggctgtccactgtttatctacaataaaatatgtaatgggtttgttgagaaaattgactatctctttggaaataagtaaattgagatattttatgatataccttaaaataaattccgtatggattaaagagctaaggaaacctataaaatatttgaagaaaacagaggagaataatcttttcatctcagtgtaggacaagccttcccaagcttatggccatggccaggttagaaataaaaatggacatatttggtcacttaaacactttaaaactccacattaaaaaatcatcaaaataaatttaaaatcaaactgtagattgaaaaaaatacttgaaaatatacgtgagacaaaattattaaaaggacttatatgaacaataagatttaaagcaaacaacctaagggaaagacaattcaagggagaaaataatcagtcagcatatgaaatatactcaactcactagcgttcaagaaaatgcaaagtgaaagatctagatactattttttaaaaacttcaaattagcaaaattttaaaatgttgataatatcgagtattgaataggcatgaagacatagatacacctatcgtgttggtgagctatccatactgtaaagtcttaacagatacaattttatcacagtttataatgcctaacctaaaaaagatggaaacagcataaacatcatctgtaagggaacgattcattaaattacaatatattcacagtatagaatacaataaaacacaatgcaaagcaaaaagaaatgataaaattctatatgaactgatgtgaaaagatctccaaaacgtagaattaattttttaaaattcaggttataaaacaatccggcaacatattttcatttatgttttttaaaaagtattggccaggcacggtggctcacacctgtaatcccagcaatttgggaggccgagatgggtggatcacgaggtcaggggatcgagaccatcctggctaacagggtgaaaacccgtccctactaaaaatacaaaaaattagcctggcactggtggcgcaagcctgtagtcccagctacctggaaggctgaggcaggagaatcgcttgaacccaggaggcggaggttgcagtgagacgagatcacgccactgcactccagcctgggtgacagagcaagactccgtctcaatcaatcaatcaatcaatcaatcatatttatatataagtacacagaaaaaagaagtttcaaagatataagtagaactgttcattatggtatccatgggtacagagagcaagaccttatctttcctttaccatttgcatcttttaaaataaaactgtattcgtatctacataatttttaaatacgcctaaaacataagaagaaattgacatcctaatagtggtggggaaaaaaaaacgtatctgtaagtctttaataaagtaggcaaagatttaagtgaagatttagaggacgtggacactaaataaaatttgattacatattttaatcctcttacttgatatagaatacaattttagacttagcaccctccccctgcgcgcgcacgcacacacacacacacacacacacacacacacacacacacacacacacagaaatgtcttgaccataagacagtaaaaaaagaaatttcttttaaaagttaaaaaactttaatcccaacaagttgagaatcaaaacataccaaaagtgctaaagcacatgcatggaaaaaagcctggagggatccattcccaaaatgattagctctgggtggtgagattatcagtaatttttaaattttcttatgttctttcttatattcttgattacaattatccagtatctcctatactgagtattatttgcctttttttttaagatatggagtgatggggagtgggttaacaataccatatttgcatagcagctaaatcaggagttggctgaggccatgggaggtttaagttgttctcaaattctcattaatcctgggtcatgctcacaactcaaaatacaaccaatgaaacttgcttcttagctaagagactgaaaacccacaactctgctattaatttttgttggaaaatctcaatgtatatgtggtataggtatgccatctggctgacttggcttcaaatcctggcctccatccttattgattgtatgatatgaactcgagtgcatgcttttaagctctcaaccctctacttttctatgtgtaaatgtggaaacaagaatgcctccttcattggaaatttttgaggttttagtggaaaagcatataaaaagtgcttgacatagtgcagggatgtgctgatgtactcaataaatggtagctatcttattcacacatgaatattaattatactttaattcacactatgcagccataaaaaagaacgagatcatgtcctttgcagggacatggttggagctggaggccattatctttagcaaactaatgcaagaacagaaaaccagataccacatgttctcacttacaagtgggagctcagtgatgagaacacatggacccatagaggggagcaacacatactggggcctgtcggagggtggaggatgggaggagggagtggatcaggaaaaataactaatgggtattaggcttaatacctgagtgatgaaataatctgtacaacaaacccccatgacacgcgtttacctgggtaacaaacctgcacatcctgcacatgtgcccctaaacttaaaaattaaaaaaaaacttataggccgggcacagtggctcacgcctgtaatcccagcactttgggaggccaagatgggcggatcacgaggtcaggagatcgagaccaacctggctaacacagtgaaaccccatctctactaaaaatacaaaaaattagccgggcatggtggcgggcacctgtagtcccagctactagggaagctgaggcaggagaatggtgtgaacccaggaggctgagcttgcagtgagccgagatcacgccactgtactccagcctgggcgacagagtgagactctgtctcaaaaaaaaaaaagtgtatattaattctcatatcaatgtttatatcaatatgctttgatatgttaatttacaattatttatgttattataagatatcatattgattctaaattcacaatgaccagcctctcatgaatttctcttaagattcactgcccagctattatcatttctctttcttttttgtttttttttttttttgaggtggagtctcactctgtccccaggctggagtgcagtggcaacatcttggctcactgcaacctccgcctcccaggttctagcgattctcctgcctcagcctctcgagtagctgggactgcaggcgtgcaccaccacgcccagctaatttttgtatttttagtagagatggggtttcaccatgttggcctggatggtctcgatctcctgacctcgtgatttgcccgcctcagcctcccaaagtgctgggattacaggtgtgagccaccgcgcccagcctatcatttctttttaccccagattgtgcttgagagttatgaagataattattgtcattatataacttatattgtattttgcaaagtgttttatatatctatcatcacttattcttttcctttcaaaaaaaaaaaactgaaaaggcataataattaaacttattctccggtgaggtgtggtttttattctggatctggtcttttgatgcctctgaagacagtgccaagccttgtctgggtctcagcaagatcattacatgctatgaggaccagcaaaggctcatggctgagcccagatcctcttctcttataattgagaatgctgttctgtctaaatataaaaccaaagagagagagagagagaaaacaaagttttgaggatagacagctggaggcagtctgccaaattatagcacctcttatttctttgatgtattcaactctctcccccaccaaaaaagatcatattcattaatatttttatttttttgttttcttcttattattatttattattattatttgagatggagtctcactctgtcacccaggctggagtgcagtggcgcgatctcggctcactgcaagctccaccttccgagttcatggcattctcctgcctcagcctctgaagtagctgggactgtaggcacctgccaccacacctggctaattttttgtatttttttagtagagatggggtttcagtgtgttagccgggatggtctcaatctcctgacctcgtgatatttttctaccaattctgtgagattacaagtttgattgtacagatgaggttactgagtttccagaaacattaagaaattggctcaaggtcacccagcagattcagacctagaactctcgtctcggggcttgcaaaaccaaatttaccacatggtcccccagagaaatgcgcagcccaagggaacatggtcttttcagataggcagatgcctggcatttaacctatttcctctctcaacctaacagtccgtctgcttaaagctttttttttaatttaattttttattttaacatggtagccatctgcactggcttcaagattgaaagaattagatgagaaggggagatggaaattcagcaaatgtaactcaggattggctgggagaggaggacagaatgaggcatagggatagcaaaggaatccctggcttagtagaaatgcagccttcacaaaggattgtgttcttaacacatagattagagcatgacactacagaatgtcccagagacagaaagtattctcaagcatcatgtttggttgtttcaaaaccttgtgtctaacagtagagccaggattattttctaacatttaaagaatggttaatatacctacatttatatatatgtatatgcatatgtttgtatatgatatataacatatatatagtatgagagaggtaaagattatctttgaggatgctctttgcagtggtatatgtgctacagtaacaccgagggaaaaactggagttggttaacaaaaagaaaatatttaaatacataaaaaatgggatttaacatgcactttaaatatcgtgttttcagaggatcatgagatgcaaagatgtttacaatgcaagaaggaggtttcagaattgcatatgatatagtcccaattcttgagaaattgtagggtaggtacctttttatatccatgttcaggtatatgaatcagaagaaaaaaggcaaagtattagcaggtgctgcttatctctgcagacttgaattcctattaattttgcctttcatcctgaaacttttatacatttttcaaattttctataatgaacacgcacttgttttatagtcagaaaaggcaatacatgctttaaatgctataatagaatagtatatatcacaagcttcacttaggctctcaaaagaacgtaaacctgtattcaagaaccacagccccatggaatgaagactctcctcttaattttagaagaacttctttgcctcataaaatacaccctttcttccaaactctaattctcctttatatctaatttttattcagctacttagtggatgcccacggttaacctcattaatcttcgtatggtaatttattagggataaagggctcttaatttgaccactataattaccctagaggtgagtataatgacgtctgtcttacagggatgggaaactaaggtatagaaacgggaatgacctgcccgaatttacacatacagcatggtgaagcacttgaactcagatctcctggcacccaatcttgtggcctctctcgatgaacaagcgaacacaagaaggcgtaaatctgagtccctttgtctcaggcatctctgcagcaatagctttcaaggaacgcaggtcaaatggcaggtccttttcccggaggcccctcccaccggccccgggcgtgtgtgcgcgctgtctgcttaattcactcatggctctgtgccacagaatacataaacaagtggggaaagcctcagagaggaatcttggtgcccaaatggagcaatttgtcttctgaaattattgtttgaaattgtttatgtcagttgccgagtttctgttctgtacttcagggacctgtttgtgatggaaggaaaagttccccgcggctgaacagccgtgctagttgaacacttgtagtgacagtgttgtcagctgcttcccagtcctccctgacttggagagggttttgatgaggttccctacaccccaatagagcaccccaagaactatctgatgctcacatgcctgctgcgtgtgctaactaatttaatccttacagcaatcctgtaaggaggtactgttgttacagtcctcccatccatagaagaagaaaccaagcctccagcgctgaaggagctatctcaaaatcccatgccttgtaaatggaaaagctgggacttgatctcatgcacctttggattctaagtccatgcttgtgactgctaccctgtactgcttcgcacaagtatccgaaccagtcagagctggcttgagccatctgactttgccaccccatcctcccggtgagcatgtgaattgtggattctgccctcttagtgacatcgtaaggcatttccacttgaggtttttcttccctattcctctagtgtcttgagttattttaacatgaaagcctcaagctcacaaacctggcagctttgtgagtgagagagaattccttttgaggcatgaattagtcttcttcaaatgttttgacaaactgagagtgtggtgcttagggaaagaatagcttcgcagtgttcgtgtgaacagacatctttctaaaacaacttgagcccatgcgtgaggctcaatcattgaaatcactgcatggtaattctgagaccgagccttttggctttcagtattctcttggttttgactcgccaaatgcccagcactagatgctggcctgaattcatatctcttaatctccctaaaggaagcagagccgggacatcccttaggatgaagaaagaacagtgtgtacctggtctcagcccccgctgcttgagtgctctcctgtaagagtcactgaggccaggccagcccagcacccctcagagctcaccttgttccttgagaccatcgagggctacctcagtgacctgatcatcattttcacctcgtcctctctgagtactccctgcagtagatgagcagacagtcaggcctatgttattcttggtcagtgaatacaacagataacagcatgcagggcaacatttggctagggaacagttatcattggtacctggaatcagaaggcaaggagcaaattgagctcaggcattagcactccacacaaaaatcatccctggctctcagccttgtttgggaaatgtggccaggattagggcaagaccgacgcagataaccaggtctctcatttcaccttctccaagcattctgtcagccaccctcttctctttaccgggaaattcgatgcttctgtaccccaaagaggaacatgtcagacccacagatgacacgggccactggtggggaacggtggctttgtcctagagtcagataatgccaggcaaaggaaagaatttggtgggtgaaccatgcacaggaagagcagaggagagttgtacatatgatgtgtgccacacagtatcagcttccagctctggaggagaccagaagcctctgatggtggtcctgcttgttactttctaggaagttatccattcatcagccaatagctttcccaaagacctatgcctggtagtgtccttgaaggcaataatgtcaaggtcaaagattacatataaggatgcgtccagctaaacctagggtaggattcaacagaaaagggaaggtaaaagactaaattataaacaggtaccactgcccttttcgcggagagagttttcagggggctcatgctctgttgtatccagggtttgtgatcttgacctggcaccatatggagaggatgcatcataaatagccatccaagctgctgttcaacacttcttaacccaggtcctaagtatgataactgccatgtgcattctgtcagaagtgtacgttttgctcacttttacaaacacctgcatccacatacccagaagtctttgattggtagaacaggatttaaaagtagatctcaaagctttacctggttgtgctgatagctttctgccaccacgggatgcccctcttcaacaattatcatatggaacctctttgtttgcaaataatagagaatcaaacactagaaaccctgaacaagcttaagcaaaaaggaacacttattataaacatactggggtatctcatcaaactgaacgacaggactgtattagcgacttgggtggaaataagctggaattggggatttgaacactctcaggctactcttctggccgtcttctgtgctccatcttctcccgcaatattgactggctttgtttcccaattcatgtgggtgaaaatggccacctccgactgctattgaattttctcttccagtcccatttccaaaattcctagggaaaagttcagtctggcttgagggatgcccatcctcagaacaaaaactaggactaggaagagagacaaaaaccatgcggatggcagaggagaaaagcatttcctattaaacccagtggaaaaccgtttcagaagagaataaaagggaggcatcaccggcttcccctcctttctttcatttgtcactgtcaccaacaactttactgtcagtacctgtctctgtcttcctctgtcgctttctctcgtgcgcgcgcgctctctctctctcccgctccttctctctgtctctcattctctctttcttatcaggcctgtcaagtctttcgggaatgaaaattactcacacatacacagatacacacacatacacatacacatacaagctgttgttaagtagaactggaaggaggcaaattaaatgctgtgggcctgacaactccttttatttatttgtttgagtttcctgggagaaaaggccagacaagcttccctaattcccaaactacatgaagctcctggcatgacactccccaaattgtaattatttgtttaacatctttccccctctctaggctgtaaactttccataggcagaacttgtgacagttttattcacagctggatccctcatgtctaagacagtgtttggacgtacagtaggtgatcagtaaatattgaatgaatgaaatgaatgaatggacaaatgaatgatgttagcatgttcaccttactggcaaattcccagatgaagacattacttcaaaggctcctggcagccctaccaatttggctaccaataatcatagtaatagtgcttttgttgttttcaaaagtctgatcaaagagtgtgtcatataagtaagtctaattcacatctctctctttctctcattctctctctctctctccatttttcatgaatttattatcaagacatagcaattcttttttttccacttgtttctcaaatttgccctcttttatttattcccaagtggactttcttccttatccatggatcatgatgagagtctccaaaccaaccctgtctcttcccatcgtctgagcatcagatgagtcctcctaaaatgtcaatgttactgagttactttgctgctcaaaaacatgccggtgtagccctctttctacaggagaaagtggaacgtagcatccatggccctctttttctgaattcctaactcctgttacagtgttatcccttaccactcccaaataggaaccttttccttgaacaaggcaatgtccaggggaacactacatattttgtggagccctgtgcaaaatgacagtgcagggtccattgttcaacaatgattaagaatttcacaatggtgaccgggtgcagtggctcatgcctgtaatcccagcactttgggaggccaaggtgggtggatcacaaggtcaggagtgcaagattagcctggccaacatagtgaaaccccgtgtctactaaaacatacaaaaattatccaggcatggtggcacatgcctgtagtcccagctactcgggaggctgaggcaggagaatcgcttgaacctgggaggtgggggttgcggtgagctgagatcacgccactgcactccagctggggaaatagagtgagaattcgtctcaaaaaaaaaaaaaaaaagaatttcgcaatggtgatagcacctcattaaaccaagcacagggtccttctaaaaatagggctctttcacagcacaagttatacacttatgaagccagccctgggtaggaagtgccatgtttatttgagatttaagattttattcattttgggccaggcatagcggctcatgcctgtaatcccagcactttggaagaccgaatcaggtggataacttgaggtcaggagttcgagactagcctggctaacatggtgaaaccccatctctactaaaagtagaaaaaatattagccaggcatggtggcacatgcctgtaatcccagctactcaggaggccaaggcacaagaaatgtttaaaccgaggagagagaggttggcagtgagccaagatcacactactgcactccagcctgggtgacagcgtaagaccctgtctcaacaacaacaaaaactgcagaggggctgggcacagtggctcacgcctgtaatcccagcaatttgggaggccaaggcaggtggatcacttgaggtcaggagttcaagaccagcctggacaacagggtgaaaccccatctgtactaaaaatacagaagattagccgggtgtggtggtgcatgcctgtagtcccagctactcgggaggctgcggcaggagaatcacttgaacccaggaggcggaggttgcggtgagccaagatcatgccactgcactccaagcctgggagacagattgagactggcttaaaaaaaaaaaaaaaaagttattttattggtcaagaataccctttagcatcttaaccataaatttctcacttgaaaagttgaaggttcagttcttctgcccttagtagccttctacatatatggattatttaataacatgttgcctaacactttagttaactcaagcgtgtgtatcttttctccatcagagtatatatgccttaaattgctttgtataattcctggtgtctagagggacctcaacaaatagcaaggaattgttcaatactatttgagaacttgaatttgtagatacacacacgaatgcatgagcaccaggctggcctggtgatcccaaagccttctggagtcaccatagaagtaatagctgttctagttgacatttccctctaaagggtcactttggtaccctgcatttcacccttaacctcttagatcccttggtgagatatgctttacaatcttgcagcgttttcctgtcctttgaacataacattaagaactcttacaagaaatattgtaatctcatgggaaaaacttgagattaagaggaatctcagagccctgaatttggagacttacaaaaacagaccttggtcaaaaatgaagccaagtggcatgaaatgttagccctccaaggagcctttgacatcatcagctcatctctcttgctttacagaggaggaaactgaagctgcagaggtgtctcagccaaagtcatatggctatttagtgggaggaacaagggctcttctcccaggctcttatgtgacttgcaagacatcctgccaatatatcagggcagagagaaatttgaatgaacttctagtcaacacttgtaggcatttcacctgtgtgcaaagcagaaattgaatgtaggcccagttttctttttaagacactttgatttttcacaaaattctggaatttggcatctaactgtacaacactcaagttataaagaaggtttccatttagacacagggcttatcgtatctgcaaaacatggacacagtctagaggcatgggagtacaagcagcatcatgggtctgatgaaatgatagctcttgtagttgccaagggcactggttgctaggcagggtacagaagagtctaacagtggccaagagtccattgtaagaaaaggtgctgcagaagtggtgaaagcccaccaccatctgctgatggaaagggaagggttccctctgctgctgttgccaagggagctggctctctcctggatttgagagctttccagtgctctggagccttcagtatcctgcaagaaagcttcgaaggacccagatgggttgggagaaagagccatgttggtgtaatggcactgtaatctacatccgctctttgctcctgaataaaatcgttcatctattcccaagcagtgtctcttaggaggtttgagatttttagaaccaaatcataaaaatagcacaccgaagttggaaggtgtttaggggaccatgcaaaccgatgattttaaaacatagagttttaacattttgtgagaggtttcgcttttgttgttcacctccatgctatttttttttctttccgtgtaagatttttagctaaaaaacactacactttcagtaatatgttttaaaaaaaatttgaaaccacctatttctaaccgagtccttcccttcatgagtaaagagtctggagcccagagagatgaatttcttgcattattattattttgatgtgttgctagaaaaagacatgtgggtttactcagtaaaatctggggagttattttcaccttcccacataggcaaggcagagccattcctagagggactagaattcgtggactatttagaagaaatagaggaagatggctttgtgggtgagggatgtatggctggtacagtgactcctcatcttttatttttgttttattgatcactcttttgaaataaatgtatattttcttctttccccaaatgataacttattaagtatataataaacagaaaccattttatcattttgttaaaagtttaaatataaattaatttatgttcgaaaaaattatctggtcaaaccatgtattctggtgttcttttagaaaatacgaccattctttggcgctgaagaggttgcagcaagtagggggcacaaataggtcaagcaaggctagggggaatttacttaagataaatggagtagttgggtagacaaaaaccaaatagtcgagtggagaggaggtagaaagaaaatcaatcacatttgaataatacgatggtgttaaggaagcagtgtatccatggcaacgtaggagaagaaatgggtaaggatgatgcttttagcaaggatgatttatttggttggatgaaacagaagattaacacacagattccagtaacttctctctgattctttggataataaaacttcatgggcccatgttgtatactggatgaaaaatggacaagaactaacaattgccaaagagttgagatgcactaagatacctagtgttattggtttaggacaacagtgttgctgaaagcattggaaagtctcctacacccagtggaggaaaaggcagctgttctccaccttgattgtcaacagcagacttctgggtttcagctgatcccccagttttgtcagtacaacctgaactgaagcatggatgggcaataaccctgcttattagagcagaacagatcgcttataggaatgatcctgggccactatttgtggcttccaaattatctaaacagttgagcagatagccagattcattgtgaaattcttacagcaaatcgtttatgtaaaaaaatgtttagttttttccttcctttccttccttccatctccttccttccttccttccatcttcttccttccttccttccatctccttttttccttccatctcctcccttccatcttcttccttccttccttccatcttcttccttccttccttccttccatctccgtccctccttccttccatctccttccttccttccctctccttccttctttccgtcttcttccttccatcttcttccttccatccccttcattcattcctttcttccttccttccttcctcccttccttcctttttttcttccatctccttcctctctctccttccttccttgcttccttccttccttctttctttcttcaggatcctttccttcttgggccctgggtggcagcccatgatgtgggcaaaagtattgccttacaaatcagagttctgctaggacacttggcctatttcttgtttccctcctggagcaagacctagtgtacccccggtttaacacatctttcattttcacatcacattaactaatgtgaattaattagttgtcagtggaatagatattcacacccatgtgcacacacacaaacacgttgttcttaaaattaaaaaataaactttgttttcctattcccgttatcttttctatttcttcttctttctaccctttcccttatccttgctttctcttcttttgtctgctcccttcttccctaaaatcctcagtacatttagaattgactcacactccgatttaatcagatgaaacttttcctacctgctgcatataaacatttacaggaatatatagcactgctatcataatctcatatattgcttctgttgctggtgtaggtataatttttggtctcttgaaatcttgtaacttcttggaaagaatcctgaagccttgatttggggacttagactcccacaccctataaagtatatattttgtcagatataaacctagtctgacaccaaacaaaacaaaatatttaggtcaggatgtaaagaaaaagtagagacagatttgatgttatgtaagcatatattatatgacaaacaatatatctaaaatccatttgatatagaaatgaatgatattagaacaactaattaacaatttgaggccaggcacagtgggtcacacctgtaatcccagcactttgggaggccaaggcaggcggatcacttgaggtcagaaggtcaagaccagcctggccaacatggtgaaaccccgtctctactaaaatacaaaaattagctgggcatgatggcaggcaactgtaatcccagctactcaggaggctgaggcaggagaatcgcttgaacctgggaggcaaaggttgcagtgggccgagatcacaccactgcactccagcctgggtgacagagcgagactcagtctcaaaaagtttttttgaaaaaaataattagagccttttgtaacactatacactaaaattaattccagatgcactgaaaagttaaatgcaaatgtaaaaaccaaaacataaatatataaggacatttcagtgatacataatctggagatggagaaggtctaagtatacatcaaagatagaaatcataaaagaatattctaagggattgcatatagagatgttaaatgccaaaaatcatcacaagattgaaaggcaaactaaaaaaaccaatggaaattcacaacatagatgactgactatgtttaatgtacttcaaatataaatagatctcctaagtctataaggaaaaaaaaatcccagtggaaaatctgtcaaagaatgttatcagacagtttgcaaaagaaaagatactaatagtaaaaaaatctaagaaaacatgtttgactcattaaaaaatataatgagataccattgttacttatcaaattagcaaagcttttttcttcttcttcagtagcatcatccattgttaataaggtcgtagtgaagttaagacactcccatagtcctggtaagagtacaaaatggctcatctttaatgaaggaaagaaaattaagtttacaggaaaaagggattaaatagatattgaagcataatgaaatattatgtggccatagagaatgagagttcatatatacaaacccacataaaaagtaagaacatattgaaaaaaatggaaaagcaaggcacaaaatagtataaaaaatggtctcatttttgcatgtagcatatttgcttatttcgatttctcaaacatacttcttttctcagaatttcctggaatgtttgtgaaaatgtattcccagtctacctcggacatactagactatagtctccaggaaggggacgagggaaatttgtgtttatcaagcccccctaggtggtttttatatcaggtaaattggggaaatcctgatcaaatctaatgtaaactctttcttcaattaatattgagactgagatccagcaaggctctgggagctgtcaaaagcaatagctatttagtagcagaatgggaactagaattacgtgtgtataattccagatgagcaatccctttttaaagccccaagcatattcactaatattcttaaatttaactcccaacaacttcctaatccctttgtagacaggtggcagaagttcttagctctattgttgcacattcggtaatgacctttctttgttgatagcgaatggaaagttttccattttcaccgttccctagcaatgtcacattttcaaacagtagctcaaaactctttaaatagaaaagatccatttctactctatcgtgactcagtaacagccacaggattcttctcaaactttcctaaaaatgtcatctttgggctggactcaagaggaacatttcagccaaggagacacattttccactctgtgaagaatgagcgagcatggggttggaacataaagtgttttgcaatcctcagaaaagcaatacttgtcatcaaaaccatggcaacgtctccatgtgatgccatcagagtctgggatcattcaggagcctcattctaattggagacttggtcggggccatcacctgtgttggtcggaacagtcacccagctgcctgttggcttcagaaagaaaacggtaccctacctgactgttgccatggagacactatggacagtgattctgagctgagcatcccttatgttgagttactagggggcaggtagcatgaaacgtgcctcatgttctaatggcttctgattcttcatttaaaaagacatgcccttcaccctcgcaccaaatggaagaaatacattaaaacacaaggtataatatgactaaagttactgttttctcatccaaatattaatagttccatttggaacttacactcatgagataaaagtttagagtccaaaatcatggttggaaatttgcctgcctaagtttataactctatggccttggatgagcttttatatcttaggagctatgaccaggggataataatacacactcctcaaggactattgggagatttcaatagatgatttatgtaaaacacttcagtccccaagactggcacttttcaattctgttaataatcagcccctttcaactttcttactaggaattatcagcatgagagagagagggaaaaggaataaaagaaaggaataggaaagaactgacctgtagtgaattaatgactcagcttcttctattcacctcattttgtgccttttccatctcactcgatgtgatgtgttactcctgtgccttcagttttcccttcatgtaaatggcataacctcttctaagggaccatcactcctgggcacagccaatgtttcaggcagtaatgactttttaaaaggtatatgcttgcattcgcatcgcaacctaaagctcccttttcttctttagattctgccatccagaaaataggtgggctttcttgtgaagcagccattatcgatacaatgcataaaggtctttgataaccttgtagagtttagaaagtggtaagctcattaatgccgtcccaataatcctgaagttgttaactattatttgttgttaatattgagattacagctatatacagatgctatctatacagaaggctggggctcttggacattgaggattatgacgcttggcagactcaaagttaaatctatgttttccgttcccaatgtccttgccccatcctgttgcttctctttgacatcaagaaaggcctgcccaccagcagcgggcatgtggcagaggtgactgtctaagtaataagcaaaatgtcacaatgtccttcaatcctgatatttccctcctcttcaacctgaaactctaaggagacctatacagccgcacctggttctccctcttctgagtgcctctgctttctctcccaggcacaggtgagtgaactctgccaagcttcctaaccctcaatttccaagagccctggcccacctatctgtacatagcaataaccttaatattaacaacaaataatagttaacaacttcacaggattattgggaaggcattagtgagtttatcactttctaaactctgcactctctggtcgcagctcccgtgttgtgcagagatagtatagctcccattcttgagttggaacctagttccagccccgagctacaagcgtggaatctagtcctggttctccactatacttgacccacaagtttctatgcatttttaaataattattaaacagtgggctgcttctctgactcaataggcttcacacctattctatgattatagaatattaagggaacatattttcccttctttaggaaggtacatgcgtagggtggtggtagaacttgctacttgttcctgaagttcattttggagaaaaatccagggtggagctgtcgtgggacatttatgtttttttaaaacaaacaaacaaacaaaaaaaaccatagaccagtcacggtgtctcacgcctgtaatcccagcactttgggaggccgaggtgggcggatcacccgaggtcaggagttcaagaccagcctggccaacattgtgaaaccctgtctctactaaaaatacaaaaatgagctggacatgatggtgtgtgtctgtaatcccagctactcaggaggctgaggcaggagattcgcttgaacctgggaggcagcggtggcagtgagccaagattgtgccattgcattccagcctgggagtcgcagagagactctgtctcaaaaaaaataaaatagaataaaataaaataaaataaaataaaataaaataaaataaaataaaataaaataaaataaggtgctccctaccagacatgaaaatatatatcattagtctagaataaaataaatggtgtagcactggaacaagaatattcaaatgaggaaatcagaatccaaagcccagacctctgagtaaagagacaacttaaacacaaacatatgactcccaattctgatgacaatggccaaaagaatgcaagaatagaaaaaaatactgctttgattctggaagcctagaaagactgacacccaaatgtcagaatcatgagagagatttctgctgttgataaaaacattgggatgatgtagaaaagacaccaagaactcacttcccacgaccttccaaagataagaatgaggtccccaaaaaggtgaatgaagagaaaactccaggaatacctgtcacttagaggtgggtagaactgggagtggaaagaaggcatgggccaaaaagtaaccttctgctcaaacagtacttttagctatgatgggttcatggaggtttgccaggagctctgggacacaaatgggcgcagcaagctgaaagcagggaagggaagggaagctctgctcagcaaagcacaaaaaggcatccgggaaggggccaagcaaaagctgcaggtggctgtgcccagagagcaaggtagcttcaccaagcataaggccagtggggcaaggtttctgtctgaagtgtcaggactgtcctatctgcagtgggaagcagccgcagagagggatgggtgcatttgagctcaatctctagtatcaaagctcagccgaacctggagaagaagccacccagggacgaattccactgctgagatcatccaggacttagctctctgcccactccctttagagttagaccctgacccagcagccaggcctccagcttcagaggagagaaagattccagtagcttccatgtgataggagcaacaaggccaagagaaatgggcaacctggtcatactttgtgggaagatcagaacaaccttttaggagagctattgtcatacgtaccaaacgccttcaaatttgacatttcctgtgatgaaatcattctacttctaggagtgtttcttaatgtaatatcaaagacgtggccaaaaatcaactagaaagaatgtccactgtgatttttaatgttaaaactttaagaaatctaaaccttcaataatggccaatggttcaatgacttaaggaataaccaaaaaaaaaaaaaaaaaaaaaaggaaagaaatttagtagctctacagctactaaaatagcatcatttgatgggtattaaatggcatgtgaatgtatctttgatatattactaataaaaatcagctaatgaaggaacccttataatgtgatcccacacaaacatataggaaaaaggacctaaacttcatgaatgaaatattagcaagaagtatccctagtttagagatgatcttagtccattcagactgccataaccaaatgccataaactgggtaacttataagccacaataaatttatttctcaccgttccagaggctggaaagttaaagctacaggcaggcttggtgtctgatgagggcccctttcctagttcatagaagtccgcctctcactgcctcctcccgtggtggaaggggccagacagctctctgaagcctcctttataagggcaccaatcccaaatatgagggctgtgcccacatgacctagtgacctctcaaacttcttaataccatcatcttgaggattaagatcgcaacatatagcttttggagggacacaaacattaagaccagagcagataaatatgttttctcctagaagctcttctatattttgcaatgtttctgcattaagctcatattgtttttgcttcttacccctttatccctttgtgctacattctaagaggacagtttagctcaatcttctagttcacaagttcatttttagttgagtttattttaatgaatgaatttttactttgcgattagtgttaataggaaagatactattttttgaattttaattttttgaattgtggtataatacacataaaatgtaccctattaaccattttaactgtacagttcagtggcattacgtacactcacactgttgtataatcatcactaagattttgcaaagctgaaactctgtttgcattaaactataaccccccattctctcttcccccagcccctggaacccccctcctactttctgtctctatgagatggactactctaggtaccttatataagtggattcatatagtgtttctacttttgtaattggcttatctcactcagcatcatgtcttcaagtttcatccatgtcgtagcatgtcagaatttccttccttttaaggctgaataatattcctttgttgttgttgttgttgttgttgttttagacagagtctcgccctgttaccagcctggagtgcagtggtgcaatctcggctcactgcaacctccacctcctatttttttttagtagagacggggtttcaccatgttgacgaggatggtcttaatctcttgacctcgtggtccgcccgcctcgacctcccaaagtgctgggattacaagtgtgagccactgtgcccggccccattttataaatatatcacattgtgtttatcctttgtccatcgatggacactggtgtcacttcccccttttggctattaagaataatgctgctatgagggtagatgtacaagtatctcttcatgtccctgccttcaattcttttgagtatatacccacaggtgaaattgatggatcatacagtaatactgtgtttactattttgaggagctgccctactcttttccacagtagttgcccattttacattcccatcaacagtgcacaagggtgttaatctctccatatccatgccaccacttgttttctgttttatggacggtagccatcctggtggctgtgaggtggttaatgtattatttttctgttgatgaattatcttgcctgtttctgagaaaggcctgttccctttgttcatactgttgccttaagggtatgttctttcctttggttaggtttagagttttctttcatactgctgatactcctcccagattaggcgattcttgattgtacgctaacatcgtgcccttgcagatatctgttagacagtgcacaggtgagcaagcttacagagaaaacacatgtcactgatacttgtgttttggtgaattcgaggattgtaagggaggaataggatgagccaggagctagtttcagaggatgaagaaatcatgacgctcttggatattgtcagcaatctataaggcccatcgctgtgtctccaaacaggctggatttgctgctaccactcgaagacctgcagacagacattcccatgccccataaccaatgcctagtccaatgtagggacagatacaggatgtcacaggggtagacctcctgtctcagtaccccagctaacaatcctgtttgattgagccttgggtcccctcctgctccttggcatggagggctcttggcacagctttcaattcctcacttgcagatcttagaacttagtttttcaatccaatcccatatgttttgtgtgtttcataaattacttagggttccaattcgctgaggaatctcattcttcttttctggtataggagtatatatatatatatatatatatatttttttttttttttttttttgagacggggtctcgctctgtcgcccaggctggagtgcagtggcgcaatcttggctcactgcaagctccgcctcctgggttcatgccattctcctgcctcagcctcctgagtagctgagactacaggcgcccaccactacacctggctaattttttgtatctttagtagagatggggtttcttcacgttagccaggatgatctcgatctcctgacctcgtctcggcctcccaaagtgctgggaattacaggcttgagccactgccaccggcctaggtatacatttttaaaactaccatttctgttatttataggaatcaggtgtttgctcagtttgccatcttgaaacagaaaacatttagtatttttgctgctaaaaaaaaataggaagtataaattaatacgaattagaacttagcacctagaaacagattgtggcttatattagaacttaagtaaatgaagaagttggcattataaatcagtaagcaaaggaaattttttaataagtggcagttatatatagtttcccaactatttgggataaattagagttagagcctagcctcaaaccatataccaaattccgtatgcagggatatcataatcaaaggcaaacaatgtgaatgcataggttaggctcaggaggggcaggctgaactggaaaagagagtttgtgtggggaataatgtgcatataggaaaagacctcaaaggctagcataaggagccaccgcaagatgctatacgaagtaatcttataaaaagggagtttacggaaattgatctgctaatgctgcgtaacatgtattgcaaggagataacccactaataaaaataagaaaagaaagatgtgagatggtttagtctagatctgaactgaaggttcttaacttttgtaagtctcagagacttccgaaaatctgataaaagtcataagccagtccatagaaatactcatttacacacatgcaagcaacatttttgcatacagcatcagtgatttaacagggcccttgaagaccaagttcttgaggtgagagggagaggaatttattttgtattcagggaaaattgagtttatctccccagctagcatgttacggtcatgagaatagtaactctcctattcaccactgtatgccaacagcaagcaatgctttcacatagtaggcagtctaatatgtaatgaatgattgaacgaatgtaatgaattaatgccttcaatctttataactgaaaaatctgcaaacaattaaaccaaaaaaagaagtatggaaatgagtgatgtcaagtaggccagtgatttctccatatagaagcaaagaaattttgtctcctaccagaccctctttttttttttttttttttttttttttttgtgagacagagtctggctctgttgcccaggctggagtgcagtggcgtgatctcagctcactgcaagctccgcctccccggttcacgccattctcctgcctcagcctcccgagtagttgggactacagacgcccgccaccacgcccggctaattttttgtatttttagtaaagacggggtttcaccgtgttagccaggatggtctcgatctcctgacctcatgatctgcccgcctcggcctcccaaagtgctgggattacaggcgtgagccaccgcgcccggccccagaccctctttaatgtcattctttcattatttgtaatggaatttttctctctgtttttgtcttctctctcctctcctctgataatatatatatattttttgagacagggtcttgcttgttgcccaggctggagtgcagtggcccagtcttggctcactgcaacctccgcttcccgggttcaagtgattctcatgcctcagcctccccagtacctgggatcacagacatgcaccaccatgccctgctaagttttgtatttttagtagagatggggtttcaccattttggccaggctgctcttgagctctgacctcaagtgatccacccgccttggcctctcaaagtgctgggattacaggcatgagccaccatgcccagccttctttgatcatatatttctcttcttttagaaattctgctaaaatgttttgtggccacttacttaaagatgatgcccgaaatcagtgttccagccctaacctctcagcctttctccagccctatatctcaattgtttatcaggcaccttatttcatatttaccaggacaacaaaaattcaggttgtctaaaattatgctcatcgttttttcagagttctctgtcaactttattataacataactctgatacatgttttcagaaccctaaatctttaagctttaaattaaaggagcttaaatttggaagccttggctttctttgggaatctaaagtgtgctacggacccatacccaagaaaataatgcatatacgcagatatagttgcatacatcaagtagctgtatttcttgcaacatatccaaagatcccagactaacaacctcttgaaagatagtaatatatatttctttttttttttttaccttttttttttttttttttgagatggagtcttgctcttgtcacccaggctggagtgcaatggcacaatctcggctcactgcaacctctgcctcccagttcaagcaattctcctgcctcagcctcccgagtagctgggaccacaggcgcccaccaccaggcctggctaatttttttgtatttttagtagagacggggttttgtcatgttggccaggctggtcttggactcctgacctcgtgatccactcaccttggcctcccaaaatgctgggattacaggcgtgagccaccacaaccagtcaataagcatatatttctatcctccttcatgtccccaaactcttctaattctttttgttcaaagtgtttttaatattttcgtcttttgtttccatttccactgcctttgtccagctcaatctaagtcaaaatggcttaatatctagagaactgaaagagtcttctaattggctaactctagcaatgggagaatttttttttttttttttttttttttttttgagatggagtctcactctgttgcccagactgctggagtgcagtggcgcgatctcagcttactgcaagctctgcctcctgggttcacgccattctcctgcctcagcctcccgagtagctgggactacaggcaccccccaccacacccagctaatttttttgtatttttagtagagacggggtttcaccattttggccagaatggtctcgatctcctgacctcgtgatccacccgtctgggcctcccaaagtgctgggattacaggcttgaggcagtgggagatttttataaacttcgtcttcatttgattaagatctatgatattgaaagataaaataattgagaattcttatttataattggtataatgtataaaatgtgttatttaatggaaaacttggaaaacaacttgttcctatcacatctggatagaaattcaccagtaagactgccggggcctgaatatttttgtatgtgtgtgtatgtgtgtgggggggttataataatcaatctatgatttaataaacatattgctattcagattttctgtgtttttggtatcaattttggtaagctttagttttcacgaaatgtgtccactttaagttgtttaatttattaacacaaatttgttaattatattttctcattatctttaatgtctagaatatatggttataacacatttttttagtcctgttattgataaattttattctctacctttataatcagtcactttgggaggccaaggcaggtggatcacttgaggttaggagttctagaccaacctcaccaacatggcgaaacctcgtctctactaaaaatacaaaaattagcctggcatggtggtgcacgcttgtaatcccagctactcaggaggaagaggcaggggaatcgcttgaacctgggagtcggaggttgcagtgagccgagatcgtgccactgcactccagccttggtgacagagtgagactccgtctcaaaataaataaaataaaataaaataaaataagtctagttaggagtttgacagttttgttgatctttgcaaataactagcttttggcattgtcaattttttctactacttgtctgttttctattataaagatttctgctttaatctttattatttcttatttctccttactatgagcatacttcttttttatcttcttacagtagaatcttaggtcactgatttaatgtttctctttttctaatataagtatttaaaactctaagtttccctctcatcactgctttagctgtatctcataagttgtaatatgggttatgggaaattatgatatgaagtagttataatatgttgtatattttttattattcggtttaaaatatttttaattactctcatgattttgtgttgactatgaattatctagaaatgtattgccaaagatttttgttaatagtatattgcttttgagttagaattaattccaatgtggtcagaaaacatactctatatgagagcaattatttcaaatttattaaaacttattctatggcctagtgtatattggtgaatgtaccatgtacacttgaaaagaatgtttattctgcagttgttaggtgtagtgctaaacaaatattaattatatcaagatgtttgatattattgctcaaatcctctatgtcattagtatttttttaaatgtagttatatctgatgttgagagaggagtcttaaaatctcctactgtcattttgaaattgtctatttattcctttaattctgtccatttttgtttcatgtattttgaggttctgttcttaaatgcatatccgtttataattgctatgtcttcctgatgaattctgccacttacaattataaaatttccattatttatctctgacaaaatagacttgatgtctattttatgtgatattaatatagttatttcagctttcttatgcttgctgtctgtatggtataccttttttccatctacttactttcaaccaatctgacactttatatataaagtgtgtctcttgcagacaacatataattgaatatggcctttataaattctttctgatacactctgttttatttgagcatttcaactattaaaatttgatgtaattattggcatggttggatttggatctaccattatattacttgttttttgtttgtccctatactttttgttcctatattccccctctcttgccttctttggattacttgatatttttagcattgtttcaatttattgggttttttttagttacaccctttgtgtttttattattggttacaatataatcattaactgtgacagtctacctatagttagtattataccactacatgtgaagtatagaaatttggcagtcataagaagtcctttatgttatcactgtaatctgtattacatctatgtgctttaagagcatcgcaagacaatgttataatttttccttataaagttgtatatgtttaagaagaaatataaatatctttaatatttattaatagagttgccatttctgacattctttattcattcctgaatatctgtgttatcttctggtatcatttcccttgagcctgaagaatttacttaagcatttcttgtaagaaattatattattttttctttacctgaaaatatctttatttcaccttcattcctagaggtcattttctattctgagttggtagattggggggcggggtgtttatctgtttctctttttgttttttattttctagctttcattgtttctgaagagaattctgtggctatgtaaatcaacatttttctttatataatatgttgtgtctcccccacctgtttttaagatttttctctctatctttagcttcagccattggattattatgtatctaagtgtggttttctgtgaatatatttggtgtagggtttactgagccttttgaatctgtacattttttttcaccaacttcaggaagtttttgtgattttgaaactgtctatttattcctttaattctgtccatttttgcttcatgtattttgaggttctgttcttaaatgcatatccatttataattgctattccctcttataattacgaaatttccattctttatctctgacaatactctgtgacttgatatctattttatgtgacattaatctgctccacttcaattaaattaaaacttgctctatgactctgctctgcttctgggactcttaattccctaacgttagacttttagatattgtcacacgaatccctgaggctaatgttagacttttagatattgtcacactagttcctgaggctctgctcatttttttttcatcttttttctctctcttcttcagtttgatctgtcttcaagtttactgactcattcctttgatattcttctattaagtccattcaataattttttattccaaatattgtattgttaagttttaatgtttctacttggtttctttttatgtgttctattttgctgctgagatttcctattttttgtccatttcttttacttcattgaacctagttggaaataactattttaaagtatttgtctgataatttcaacatctgacccatctcgaggtttgcatctgttcattgtcttttccatttagaattggtcacattttcctagttttttgtgttagagtattttagattgtattctggacattgtgagccttatctagtctccaagttctgttgcagtcctctggaaaacacggtttttattttagcagatgattaatccaagtggattcaagctttaagctctctcttgtcagtgtatacagagaaaatggaatatccatgaggaggagtctgaatttccaaagatagaatgtgtttggaggagagggggcaatgggaaggagaacattgtaaatactgccctcagaagttaataattcaatattatttaatttttactattacatgtatatgatatgtataatctatttgtgttatagatacgtaatattgggaacatacttatatttatttataatgtataattttgagaattttacagtgttttaatttttctaagaaaagcacaactccaatagtccttctttgaattcccaggagaattccagattctcataatactaccacttatcaaaatgtcattacatgtgccagacattctgctaagcaatgtgcatacattgttttatcaaactttatggcaacaccaccaggtaggcattgtttttatttacaaacgaggaaactgagggtcagagaggttaagcaacttgcttagggatacacagctattaagggggtagagatgagatgtgaacctaggtgggactctgtctccccttttgatatcactggttgccaaccaagtggaattagatgatatttatcttgcaaatgacagagtgtagagagagagagcatggcactgcgaaaataacaatcacttcaaagaggagacaagtattctaattctagtttgggacagacttactgcaaaaccttgtaaccttctcagcttctctccttcttcttccactgtgtctacaacagaaattaaaatgtacttcaaataatttacagaactcttttagaaataaaatgagacgatctatgaatgtgtaatgaaaatataatgattgtaatgatatttagcccaactcacaaactaacactcccttttctaagttttacagttaagacttcaacaaagaaggacccaggaacaactggctaaccaaggcataataccacgtgagtacctgcatctcttaattactgatatacatagggccacaccatttgggagctggaaagtgcctcagaggtcatttagtttaagccaatgcattggtctccgaagatcttcaaagcattggtatcagcagaaatcccagaccttggatgctttgccccgactgctacctactcacctgcaaggggctccttttaatgatactggttatgcctaaaattccaatgtagtggatttgttctcagggtaaacacaattcattatgggcacccctgactcatctacttttaaaattggatataattaatattctttccagaagcatcaattacatcatctttttctcacttcctgaatttcagttctgtttgggatattggagtccacaagtcattgaatattggtcaagtatttcctttctagaaggtggagtggcaataccattttagcataaatgatataatgttgaattactggccacgaactgggtaaaagaagaaggattattgtatcttttagaagatatattttaaattttctaccaattcagcaatgaaagctaactcttggttatctgtagaaatagagaaaagggtaccctggatgaataagtcatgggtaaagctgctctaggtcatagattctaacttcctctccaacaaaatttaaaaatcaagatctataatgacttgtgcagaaattcaggtgtctgtaaaatgctgttgtgactgttacttcagagttcagtatacaacaagcagaagtttgcccttgaaaaactgtagtgtagttagttgtattgaagccctatgtatagccctatatagtgtagttagttacattagttagaaaaaatgttgtgtagttagttatattgaagcgctatgacccatggctaaacattgaaagtttagtctttgtttcagagccagaacagaactaagaatttttcaggcctcttgttttgtaattcaaaagtaatcctttgttcatggctaagctctagaatagtaaacagtatgtgaccttaaagtgggacaactctgttagaggtttgtgaagtacaaaagaaacagctcaccctgtgatttcaaggctgtttaaacaacgttgacaactatgctgaggaagcaaaggagcaagtctatgtgtggcctgtttcatcttagcctttctttggaggtgctaaagacaggaagaaaccaaaggtctgcggatgtcagatcaggtcaagacaatttcactcaaagctgataatctatcccttcaccgatgtttctttctctttaattctggaaaggcaagtggagcaaatggacctgcaacctttccgtaagcccaagttgtacacatctgatttaaagttggactcatgtgcttaaatactctgagcctgggtcttgcagctggcatttggctgagaataaatatttttggagggatacggggttaaatctgaaaattagtaaaaacacccaatgaagatggtaattaaccctagcatacattgtaaaataacacctatcatgtaagttatataaatcaaatgttcatttgtatagtagagtccaatgaaatataatattttgttccccaggaattccagaatcaaataatatgcatattaacaaaataccacttattagaaattttgcatcattagtccatggcatcattaagataatttctagaaaaaaatcctacaaatcatgaaataataaagcattttaaaatcacacactatgatgaaggttttccccaatctgcagctacctcctttcaaccaggctttccaagagtgtagagtctgctgtggaaaagtgtccaagtcacggctggtgcacactgcaggccctgcctgtacagaccttttctacttagctcttctcaggaagctagagataggatgcatctcttcacctgctgatggttagcctcttcagtccaatcagagattaaacatgcaatctacatgcatttcagcagagcagtgtgtttcctctggcacctaaggaaacatgtctaaatgcaaacaattgggagaaggaaagaggaaccaagggcctcaggatattttcaattcaatataattcaacaaattttattataaaccaggctatgtacacgggaccatgccaggcactttagggacaacaataataagcaagatggtccctcagagagagtcaagatattagggggaaagctgataaaaagcacacagaagcaggctgggcacggtgactcaagcctgtaatcccagcactttgggaggcagaggtgggcagatcatgaggtcaggagatcgagaccattgtggctaacacggagaaaacccgtctctactaaaaatacaaaaaaaagaaaaaattagccaggtgtggtggcaggcacctgtagtcccagctactcgggaggctgaggcaggagaatggcgtgaacccaggaggcagagcttgcagtgagcagagatcgcgccactgcactccagcctgggcaacagagcgagactccgtctcaaaataaataaataaataagtaaataaaaattaaaaaagcacacagaagcataatccagtgtgcaactcattaccttacacaagaagactttattttttcattctattatttaaattttttgaaacagaaagtaaaagaaaaggagaaaggaaaagaggaagaaaagttaatcatcctcagagcctacctaattctgtgattttctaattttttaattgttacgtcttatgcactatatatatgtgtgtgtgtgtgtatacatatatacatatatatgcactggctgaggcagtgtcaaggatctatgccccaattactgggcctctccttgtcccttccagaagccccctgataattctctctgcagtgctggttctcttcagaatagagtttgaaaacccctgacctaccccagtccctgtttgtctttaatgttcatgaaactgaggttaaagaggcctaagaggtttttcagatgtcccaaagcctacatctaatatggtcccattttctgcagtttgattgatgagaatgtaaatgcatgccagataaaattattcataaaatcttgctttattcataagatttgaaatagttgcaatctttctaaacatgtcataaattgtcaaaactcaaagttgatggccaagtgaactgttaattgtccttatcaaatagaaatactttttttttttttgagacagagtctcactgtgtcgcccaggctggagtgcagtagcgtgatctcggctcactgcaacctccgtctcccaggttcacgccattctcctgcctcagcctccgagtagctgggactacaggcacgtgccaccatgcctggctaattttttgtatttttagtagagacaggtttcaccatgttggccaggatggtctcgaactcctgacttcgtgatccacccacctcgggttcccaaagtgctgggattacaggcgtgagccaccgcgcctggccagcaatactatttttaactggtcgacagaagcacctgccaccaattagtcttgagttttacattaggttaaatcttcagggcttatcccctggataacatgcaaccccttcctattgtggaggagctgaggccagaacctgtgtctcctgatccccgcctaggctccttttttcaaacgttcaaaatgaatcgcttggcctttaaaaccacttatattgctatcataaggcattttatggccaaaaaattcagttagaacttagaaaatttcaaaagtgtgtcgtgcgaaaatgccaaagataaaacaatgatttaaatgcaatggcttcagattctacatcataatctatgtttcgccatgatgagcattgaatgaaaggtttcactgacttagctgtatggcaggtctcccttcaattgcattccaaattgataattaaattatgaggctcctcccccattgactctaatgaggtgaatcatgtgtaattctagtgaaactaatccaaatggattgaaattttcttccttcccttttcctgggcatgcattctgcagggtttgaggttgctgctgagtaataaacagtggttagcaaccagcaacaaattgttttttataatccccatgaatcacttctcttaaacattcactttgttcttatgtgtgggcattatgagtttaggctaatttccctctttacatgctttgaatgaatttaaaggcaccatctcttgacttttagtcaagacaggcagggttctgaggccagcacagaatcactggaacaacttaagggttctcagaccaggtgcatttacaatggcagttgtgaaattcacattttcaaactcggcatgaaaccttaataaaatagtctctcaaagttaacttagaaatattacttaaaggacttattgtttagatttatctccaaaatctcacctctaaatctcaatatggagatttcaaattgcctactttgccatcatcaaccaggattcataggaaatggtttcactatcccacccttttgggctcaaggttgcaagagaacatcaaggttctctacattctcgtggcattaggacagagagtccacctccttccctagacctattgggcctgttcatcatttcttatgcaaattttctctcctgcaattcttctccctgggtatcactctcctgggtaaaattttaaataacaccattttattccaaccgcttctgaagacttagtgtggaaagatgaccagccatgtaaatcagactcaataaactggtcatagagcatttcagtaaatctttattaatcctctgctgtgagaaaggctctggggaacacacacagagaagtcagactcaacttctgtttcaaagcgcttccagtctaggaggggccccaaaccacccccatttaatcatcccatttaatgattttggacaacctcacaccactacatgggaatggctatccaggaagattgaaggaaagatgactttttcctctccgtctccctctgctactaaagtgaatctatgatgtttaacccaggggagagatgaaagaaggtttaatttattctcctggaatacagaagatgagattagagatctaaagtggacttgagaggacacggggcccggggaggctgctacgtgtccacagagtctcagagaaagcccctgctggccagaatgaaatgtctgggcagcttggtttcatgatctgatcaatgtaaatgaatttaaagatacaatgagctgtctatgaatggtgctgcctttattttttttgcagactaatccaagctacagcagccacatacttactgcaaaaccttggtaaatccctgaattttgtggtacttctgaatagcaagaagaatgaccggggcaattcccgcacccatatcacatgcagcttcacgatagttttgagaagttgactggacaaagtctctcttccttttctcagtgcattcatttgacttggcttttcccccacagcaccctaccacacactgtcggctgtctgagcagtacacggcgcaagggaattaatctgtctgcctcttcccttctttctaacatctcaaattcagagatagaaaaaggtgccctggattttcatgtcaatcccatttgggtcaaaaatctgaccttccttcttttcccccatctctccttcaattttccatttccctgttccttagaaactagaaaactagtcattacaggcacactttgaatttgtctttgtaccctccttctgagaaattccaaagtgttcacagatgttgcaatcaaattctccaagtatgctagccaggtcttgaacattagaaagctacattgggaaaatgcactgttttcagactgttgagactattattggggtaacagacccttaagactatcattggagtactgaactagcaatttatttccaagcataaaagaaaatataatctccaaagcattatcattatatatataaaaaaaattctcatgacccaatttgtctttaaaaccaagacagagagaagacaaacatgaataggcccatttttataagtgggaaactgagagcacaggaaaactctcaggcttactcaaggttataccaaaagtagatggcagagcaagaacagagctcaaatggatggttcccaaatatttagttacccaggacttctttaattctacccatcactgccataggtcttatgtttaaaatagtattgtcttccctgtccacctaaagaatcctacatgcattaattattaatccatgcatcttttaaatagttaattttatgtttttgagttaattttctaattaatggtatataaatttaccagctagtgcttgttgatgagaacaaccgtaactaaaccaagttgctatgattccaggcaggagcaatgaaaagtgacagctttgttagtccaagcagcctttctctggacagacatactctttctcttcagcttcttgaaatgctgaaaatcagtcctgatgattcattgctccatttttgaagtcctaggttcccaacacccctagatcaagatccactggacttagaaatcccatcacagcggttctgaagcttttgcatcagaatcacccagaaggcttgttaaaacaaagattcctgggttctactgagagtttctgattctgtggggctgggttggggcccaggaattgggatttcttttttctttttttttttttttttgagacagagtctcactctgtcgcccaggctggaatgcagtggcgcgatcttggctcactgcaacctctgccgcctgggttccagctaatttttgtatttttagaagagacagggtttcaccatcttggccaggctggtcttgaactcctgacctcatgatccacctgcctcagcctcccaaagtgctgagattacaggtgtgagccaccacacccggccaagaattggaatttctaacgtgttcccaattgctgaagatgctggtccggaagctgcacttagagaacgctgcactcgttgccgccccaagtctctggctctttaattcttcctcttggtcctcttagtagcaatggatctggtattgctccaagcctgcagctgaatggtcccattaagagaagtcagggtctgcaccaggcacagcccaacaccaggtacagcccctgcttctgttgctggagttgcccaactccagggaccctaccctgtgctgaggagtgaggcccctgccttcaatgagttctctgtggttccacgacctgtcttctcctttttctgggatcctgctggaggcacgaggttacagtggagagcagaggactgcaggaagactgttcttatcttgggatcttttttctaagttctaagtcagcaaatgtttatatgctcggctgacccaaattagcgatagctttggggacagaaataggaatagcccacaacaaaactctgaggcaagaacacaaattcccttgtgaggagccattaatcttcctccagggagaatgagttagatgtgtggctgactgaatttacaacagtattttaattcaaaatcacatggacttttttaaaaatttagaatccaaattccttttcaatcttaaaagtcaaagttctttaaatacaaaatgttgccatttgatactccccaggctggcagcagaagtggttttttgtgtattttccaaaaacccaactgagaggtggggggctccattgcttttgttggccttcatgggaggtggctaaaacccacggtctctgaagtcactgagaaagcaaacctcaaccccaggcccatggcaggatagttttccatggtgtgacctcaagccagtggcccatataacaccccttaacctctgaggagaagagcatgtggtaaaatgcagcatgtgaacctctctggctttcttcccaagtgcttgctaaatggagatagtttcttccaccctgtggcagaaggttccagaagacctttgtgctcctggcatcagagaactggaccgtgtgaatcatctcacaggggagttattaacaccaagaagtgatgaattgtagttctacgaagctgagatacaggaaatacagtgtttcttagaacaattaataagctttgctaataagaattgaacagcctcagagacatgagaacccattaaattcctcctaaaccccaagcccagttaaaaccaattgtgtttggaatgtcagcgatatcccaagatctattcatgctaatcctttcagggagtttctagaggaaaagggcatgttattctttttaaccacttaataaggccacacgaagatccattcattttctgggttatgtaagtaattaaactacactaatatacaatacctaactaaatgattaccaggagataggacagaggtattgatacagattgtgtagatccacaatggcccgctggacttcaagcagactttgtatcataatctggttgcttagggggaaagggagttgctttgcagaactccctcgacataaattccacctgcgatcaaacacaggaaaaggcaagccttattaaggatgatgaccagacccaactcaaagaaaatgcatgcgcaacacaggacagctgcacgttaatttctcagaatcactgagttgggagaaatgggagaaaagggtcatctaaaaagggaggttttgcagagaagctcattttaagagtaaaaagcagaaagcaaagataactgaaaaacaatttctagatcaatggtattcaagaagcatgttcatttttttttctataagaagggaagtctcttaatctttggtcaaagtgagaaggatgcctgtcaactatttttggcacaaggaagccagatggggcaattctgcatgttccttcagccaacattgttaatgttggggtgaacagggagatttatagagagcgtgacctgttaactccccaagcagcatccttaaagaggatactatggccaactaccattatggtagccgtcatgactacaactatgtctgcttgatctccagcaaaccctgctgaaaactatgttcagattcagcatggtcttaagggttgaatgaggcacgtgcacacacacacacacacacacacacacacacacacacaccccgatctggtcagaaacctaatttttgtgctggccaagatttggaagaatatttcatcacctgcagcttacagtagaccactgttctagtaacattggaactcgggatcatgtgattcctcaagttgtccagacatacaattcaggggaaaaaaaatcaatgcaagtctgtaactgctaatcaacctcatcactaatcatgaaaagtgattatttgtggctcctgattgagattgttctagattaggaaaatcaaggcaaaatgtagaattttgcaaaatgatgttctacttctttgctcaaaggagtttattaaatccccataagaggtgctatgaagggtgatgaggaggaggtcatgggaagagagtgaaggctggcattccatccaggttgttcacggctgctgtgtgttctgtatgactgaccagtgcctgtgtctactggttgttaatattttacatatcacatcttgaaagaggttagagttgtcacaggacctatgctcctagccctaactgatcctgggcaagtcagtcaatttctgtggacctcagtttccccattctgttcacggttggagttaacttccctgtctccaaggttccttccagccctcaaagtttgattctctgcttctcactcaacacccttagttgcatgttcctgacctaccagccacacactttatccagagtaccgtcccttcctccaaagcaccaccccaccccacagacacagaccacagtcatcccccaagccttttgcactctagggcagagcaaagtcaaagagggtggtagttacccaagtctacacctctccctcaaaccagagcgttatttctgttttcagttttccaccaccccttctatttcctccggaacttggaatgccctgcctccatcacttctcttcttgttgcacatcctgcctctgctactccccgtttgaggcttcgattccacttcctctgtctcctacggcttcagggccgctggtgtcctccaggcctgtcctctctcattgcttgtggcctaataaaggcaatcacctccctactgtgcatagctcagcaagcacaccagcaaactctgcgatacagaccaatgcccttaacccagcctccactcacgtttttgtgtttctgtttcagcactgaaacgtccagctgaattccatgagcaaagaaaacatttggatagtgacaaggtaatttttgcaaatttcttgacccaagcttagactataggttatgaatctctgaatgctaatccttggtggatgcgtgtagaattcctacaacaaacacaatcaatttgccagtcccctgccctcatatcatgtggaatcttactcctattaaccggtaactatagaaataggatcaactatattagctttgaaactcctatttttcagcttttttaaaaaatgtccccaatttttctaatgttggaagaaattacagtagggatgcactggagtcaaaaacactttagagaaggaagtggagtcggttttcaagctgccttacctgttattactgtcatttcttaacaacaatcagattttaaaaaatccaattcaagggtaaggcatggtttatgcatacagaactcatttgtagctacttaaaggcaaaaggttattttgcttttttcccttctttttttgtaacatttgagggtgagatttggcatatattctgtaccttcataacaaatctctgcaacttgaatttgtcaataatatattaataaatactatttagcaagtatcaacactttgagtgagaaggaaaggcaaagagagtatctgcctgctggtatttccttacctgagagtactagccttgcagcttgtctatgggtagagaggaagaggagggatctgcaactcttcaaagtagctcacaagtggctgtgattcctactacctggagaataacaaagaacagcagactcttatcagaactggagtgattcccagacccctctcagggggccactgggagatccactgtagtgagataaaaacccagaactagacatcagaaacctggggtccagtgttggccctcccacagcctgtaacagccctaccgacagccccatcaagaaggtaatgagactgggtagataacccatctcttcatgcccatccagttcctggtgggtctgaatctgtaggctttacattttcacatgtcctaaaagagaagtcaagcgaataacgggaaagaggcatacgttgtcatgttatattagatggatttaggcaatgttttaactctggtcttggttaattttgtgactgttttcagaggaaatggaggctgggtgctgtggctcatggctgtcccagtactttgggaggctgaggtgggcagattgcttgagtccaggagttcaagaccagcctaggaaacatggtgaaaccctgtctctactaaaaattaaaaattaaagaaaaaaattagctgggtttggtgatgcatgcctgtggtcccagctactcatgggactaaggcaggaggatcacttgtgcccaggaggtcaaggctgcagtgagctttgattgtgccactgcattccagcctggatgacagagatgctgtctcaaaaaaaaaaaaaaaaaaaaaaaaaaaaaaaaaaaggcaatggaataagattcattataatacaaacagcctagtgttctgttatagtgacatgttattaacatgtaccaacctgcctgtccctgaaaaagctttaggtttgtagccctgatgtggacccaagctctttaccttcttatcttattttcccatctaaaaattactcgaggggtctttggaaatgttccttcatcaaaatgtgggacaccaagaatattttcatgtttcatttattattttaaaaggttattttctcctgtgagataaattgagttttttaaaaggtaaaactaggtgatttctcttgtttgggttctacaggctaaaaattccctgaagcgcaaagccagaaacaggtgcaacagtgccgacttggttaatatgcacatactccaaggtaaggctgcaagaaatcagacaccaagagatgctgcagaatggtgggccattttcccagagttacttgtctctgtacagttgctaagccctcttaaaaatctcccttgccgttacaaagtggtagtttcaagtaatcatctaagccttctaggccacgtagatacccaagttgggaagccataaaatggttaagcgggttagagacttgggctctaatctcagctgtgcgatctcctaactctaaggcctgggcaaatcacataacttctaggagtgcatggaacacgtccaacatgtgctgacaattattactaatctggatcatcactcactttggaagaggatcacagttcccttgctacctctgtattctccaggtaattgattgtcctttgctgatgcctttaccttctggtgtgcagggaatacaatctgaggaaattagtgctgatcaaagtaggcctagttctgccttagggtgccacctctgtgctggggtatgtgagacaaggcaaacaaacaactaactggtccccatattctgacatctgcatgcaggaggagtggcttctactcccgcctcataagttgccttccctgagacagaatccccgagaccattggtgcccaccctaaaagaggtccaatccctaatttgacagttacctatgagatatttgttccttgaacacacactgtattgggtgtctgctaggagttggctgctctgccaggccagtgggttcaacgatgaataagacacaggtttgtgccctcagagggtctcacagtataacagaggacacgagaatcacatttacaatccagcatgaaaagaaaggaaatgcctggtgtggtgggtgtatggaagaggatcaaagaaaagagccatcggaatcagaatggacaggggaggagtgaggaaatgggctggaacgtgagggctgagccaggtagaaaaagatggaagggggtcgcagtctgagggaacagcctgcacaaggcctgcatgctatttctctagaatgtggatttccttccaagactgaacactagctttaaagcgcacgaaagactctgaaatatatcctggaaattgtgaaccttggttctttgagtgacatcatttgttatttattctggctttccaagactgaccctttttcaaccctaaagtaggtgggatattttaagacggagaactgttttcagggtagggaaaagaaagaggccaatgctgaactcaagggaaggctgtgtgggatgggaggctttgatctgcgtgaggcagccaaaggatgccaggtgtctggaaaacagaaaaaagtccctcaaagggaggtgacagaattcttacctcctttgcaatggtgtctacaagcctagaagcagctgctatgtcagcacaaaaatcactgctgcacaaaaatccaaacgatgtcatttcaaatgacatacagacctttcaggccgggtgtggtggctcacgcctgtaatcccagtactttgggaggctgaggctggcagatcatttgaggtcaggaattcaagaccagcctggctaacaccgtgaaaccccatctctactaaatatacaaaaacttagccgggtgtggtggtgggcgcctgtagtcccagctactcaggaggctgaagcaggagaattgcttgaacctgggaggcggaggttgcagtgagctgagatcgcgccaccgcactccagccggggccacagagggagactctgtctcaaaaaaaaaaaaaaaaaaaaaaaaaaaaaagacatacagacttttcagtgatcaagttaacaaataaaaataagtatcatgtgtggcaagagttacatgcgttcccatacactgctggtgggagtgcaattggatcaacttttcaggagggcaatttgataacctgtatcaaactccttaaaaatgtgcccaccctttagctcataatataatgtctagtattttattcaaagaaaataatcagacaaagatttatctcacaatgatgcttatcgtggaattactttagatggtgaaaaatagtgaaatgtctaacaatagaggattggctgaataaactatggatcaaccatacaatttaatgctaatacaagagttattaagaaattatttttaggctgggtacagtggctcacgcctgtaatcctagcactttgggaggccgaggcgggcggatcacctgaggtcaggagtttgagaccagcctggccaacacaatgaaaccccgtctgtactaaaaatacaaaaaaaaaaaaaaaaaaattagccgggcgtggtggcacgtgcctgtaatcccagctactcgggaggctgaggcaggagaatcgcttgaacccgggaggcggaggttgcagtgagccgagatcgtgccattgcactccagcctgggtgacaagagcgagactcagtctcaaaaaaaaaaaaaaaaaaaaattttaggcagctagaaagggtaaaagaattctcggtggaattttcctttaataaatagcagctccaaaccatttcttctctgacagaaagcagtctgaaatagatatgcagactaggagcttttatatgtaaatgtcgttagctgtacctggaagccaggaatattgaaaatggcgtctcccgctcttttccttgtcaccacgtttaccagtgtcatggcagcctccaggtaccacatgtacagggatcatggccgcctccaagtggaggccgtatttgcataataaaagactagggtgggagggccagtcttttcaggggctatgtaaatgacacaactggtcaaaccaatcccctgggacctatgtaaatcaatcaccgcctcctcaagcctctgtacaaaatcgattgctctctgccacaaaccggagacccttcttgggcgatccgctttctcagcatgtggaaggtttttctctctctcttctttttctactaaaccttccgctcctaaacccattcctcgtgtgtatccctgtcctgaattctttctcgaccatgacaaagaaccaggtatatatcccagacaacagacccatttcaataccatagagctactacaaacaaggctttcaaagagtaatttaatgagaaaaggtttacaggacaatgtttaggaaaaagagcaaaaatcaaaactatatttgctgccaaattctgggaagaaaaattatatacttattatatacttaaactatattcatagtcagattctgggaagaaaaacataaacctaccaatcaatataaataactaagaaagacacacaggtcttaaaaataggtgacaccggccaggtgcggtggctcacgccttgtaatcccagcactttgggaggccgaggcgggcggatcataaggtcaggagatcgagaccatcctggctaacacagtgaaaccccatctctactaaaaatacaaacaattagctgggcgtggtggcgggtgcctgtagtcccagctactcgggaggctgaggcaggagaatggcgtgaacccgggaggcagagctggcagtgagccgagatcacgccactgcactccagcctgggcaacagagcaagactctgtcttaaaaaaaaaaaaaaaaaaaaaataggtgactctaagtagggattttcctgaagccttcatttttttttgcacactttttttttttagcatttttcacatttatgacaatgaggacacagtaatgctataatcaaaaaacatatgaaatgttatttcttccatcattacggtcttgaattaaaataacagggtgtgaactgcaccaacccccagttcaattgcatgtctctggtgcctcccatggggtcctcttttgtcaacagaaattgggaattagcttcttggagcataaaagatctgctagatacaaaatgactcctgctgcccaggaatttattgcccagtttcagaggcaacaagatgaagggtttgtccttgtaactgctagaggcagtcaaagcgaaagagatctataagaacaggaagagttaggaaagccttatgctgggacccaaaagtacgatgttggtaatggggagtggggaagaagttcaaggtggggaaaggaaataagccaaggtgcaaaggtgaatgcagcaagacatagaggacagaaggataaggaccaggctctctggaatggtagatttgggctggagagccacaggtcatggcaggaggtagattaaatttgtagcagtcttgaaaaactggactgagagatgtggatggtgggaagcatcttgtacggaggcaccagaggaaaagagggctttctgaagatcagtcctgagttggtacacaggatgagtcagaaagatggctgaggcagagagccagcaagctgcccttgcaaggaactgtaaggggtgctttggagaggacatgggctttggtatgcccattctttggtttggagtattgacattccctccattgaatgtgaaatgctttgaagaggcagcttccacagccaagcctgtggcaaccaataagacatccctagacttcttctgtatggagagttctagatcagtgccagacacagggtctgggattagcaggttgataataataaaataagggggctaagggacttgtctgtaaatatctcactttctagatttatgaagttgagagtgaaggtgcaaactcttatagaatcttaacttacagttctccatgacagcaataagttggctggattctcttctgagttcttccacagaaataagtcagggcccaacctaaaaaggaagtttggtgtcagctgtatcgaagtggatttaaggctctgtacgtgacctttcacaccctccaaatgatgagaaactgcctgtggatgaattcaacttttaaaaatccctctgtttaattaaataactgtttcaatggaattttttttctttcgcaactgacctggacatttgactcagtcggtcacagcattgactagtccaaaatcctttaaaagtcatactagtactactaattataacaacagataacatttactgcaggcctagcctgtgccagtcactatgcagaccaaatgtgcatccaagtgccatagcttagggttaggcaaacaatacaggccctgcagactggttgcttacaaaatctccaaattgtacattttttcacgaatcctcgcaaagcaagcttctctaacttttccatgtgcctctcgatttgcctttatttggaagtgtctaggctttggtgctaatccctgtaaagtgatgatgattgcatcgaaaaattattaggatggtagagcacaatgtgacacaatcgtttgtaaccacaagccaaaaaacaaaaaagagagagacagagacatcaaattctagaactgatccttttcatttcaaccctttagcttccactgcagagaggtccattccaactgctcagatgaagctgaaaagagcccgactcgccgatgatctcaatgaaaaaattgctctacgaccagggccactggagctggtggaaaaaaacattcttcctgtggattctgctgtgaaagaggccataaaaggtagttagaacaaatggcatgtctctccttggtgctattgagatctgagggcagcccggagctctgacatactaggatctttggggatgagggcctctcaccagataagagccataccatgggttgttagtccagttaattctccataaccagggatcctgggcatttgttgcaatccccattcttgtacaccccaaggccaagtcaacacagggtaattttgctctagtcaggcaagttgagaacctgaccaggtgtaatgctcaaaacatctcccctataagacatccattacttaggagtcacagtcatggtcctgtttagccttccttgtttaaagagaggtagactgtatcagcggaaagagcactggccccagactagaaaacccggaccctagatccagttgcccaattcacttcaccttgagatggaggtgacagtactcaccctacccagctcacaggctcctgggagtgaaattcatggtaaacagtacatgtaaaaactctgacagctctcacttgctccacgaagtcaaaggacaaatactcaaaaaggagacacaaatactgattctgttataaactgtataacatcgttttgtagactttttgaacaactgatactaggtggacccaaacagcctgccagtactgaattcactcatagaggctttggggtggaacccaggaaaactatggtatcagggagaaaggggagcttaatgctcctacagacacacttagctttctccagctatgccgcaatccgctctgagaactattggtagatattaataagcagtgtatatttaaatgttttgacacattgtcaaaaagtaggtgtaagggcattttatccaaaactaagtttattataaaacttgtcatcaagtttattcacattctaaaatcttgctctcaccctgcgattcagaggccacatgaattttgcctttggaactggtaaatatgaaaatatcaactccaggagaggcaatatacttgtctgtcagtgtctacttaaatatcccactgtgattttctctctcatctactctctccctccccactaaatatctggggcctttgaacttggccttgagtattcaagagtgcactgccaccatgtttactctgataagctcttgggcaggtaaaaatctccatcaggcatctcttattgtttcttaaaacattctgttctgtgcctgtaaatttatttatttatttttcttttgttgagtgcatgtaaatttaagatttatttttacatgataggaaaaaggtctcctttcaatttgcattctttggtttctagtagattatatttttccttgtgattatgtatcgttggcaatacatgactttttctctgaaaaagaaagctgagcatgttctcgctttactgctttgtgtatgctatttatatagggaaaaaatgctaatcctccatctgtcacaggtatctcacatccttttaccagtttgtccttcactttttatttttttatatggtcaattttacctatagcagttcctaattaatctatagtcaaatccgctcatctttttcattatattttctgaattcatttttattgaaaatatttcctaacttaaaaatatagagtttattcacctagattgccttgtaatatctatatacttttatttttacatttaaatccttagtatgtctgaaactatttaagtggttggtttaagagagaggtctaatttttttgtttatcacaattttatgatctattttacaatttgtgttaatatctgtcttcacaagtttctttacatttgtctgatttttctaaagtttcatggctactcttgcaagtatattttaagtgaaaattagaatcaattttttgtgtcaacttcaattctattgcaattttgtttaggattgcactgaatttatatgttaatttatggtgaattcatgtgtttaaaatatataattttataaattcttccatagtatctatctccacttattcaagtcttttttttatttccctttgcaaagtttgttgtttttaagtaaagtcacattgattattgctgatatatgggaaacctattaattgcgcacatttattttataactgggcagtgtcaaagatcttaatagttccaacagtttctcagtttatcttaagttgtccaggtctaagggaatggaaatttgttttctgcttcatttttattttctgccttggttcactggctggtacttgaaagacaacaacatgattagcatattatagaattaatatattttctaaaaatctatgtagtatattaataaaataaattacatgtcatgtttatgtattttatttatgaatatagtatatattatttatgcattatacacactttatataaattatatattataaagtatactatactatattatgcaaaccaaataatatatatcttatacaaaatatctatatcatatagatgtttatcttatatataaaactatatgtatgaattatataaagcacatgtttatattatacaataatatgttaatatataatttaataattattgatatattacatagtggaatactattgttattgataccttgccagtgcctcaaaagtaatattatattatatgtattatattatattagtgttgctgtatgttttatattatgttataatgtcttatattgatgattacatacatttttgttttgtttctctcttaaatcggatttttctagtcactcacatctgtatatgatgtagcctttggtataggatagatattctaaggaagtatttctctattcctatcccactaagagtagtttgcaagatagatgttgagtttttttaaacgcttttaaagcatatcaaaagatgatgaggtggcttttcttctttgaccaagtaatgtgatattgctacctttcctaatcttccttgaatttctaggggaaaacaatctgtcataaatttggttctagaaattgctagtattttatttgggattttgcatctatttcattattagttgggataatgctggctggggaacaaaccacaaaacttcaacagcttaacaagaaaggtgtatttcttgcttagaaagagttcagagaggcttttcctccatgaaaagcctccttcagtcttgttgcgccatcattccctacagcgagggtggcactttttcttaagggagcagataataaatacttgagactgcccctgtcactactcaactctgatgttgtagcaggaaggttgccatgggcagtaagtaaacaaataggcatgactatgttccaataaaactttatttacaaaaacaggctgcaggcacacaggcctcagtttgccattctctgccctagagctttgtcattctctgaatgtatccagcaaagggggaagaaaagatgagaagtttcatccacttattaaaaaaaatctcaacctggaaatgaacacatcacttccactcacattccattgtgagaacagtacaaatggctgagaaaggtattctctggctgaacagccatttccagcactgcctctgtattatggaagggggatcctggtttttgataagtagctagtcctgtctgccacaatattcataaatgatgctggtctatgttgttttttatttttcagatttaaatgtcaaacctacacatacttcacaaaatagtttatgattaccttttcatattttttcatgttctggaagcatttaaatatgatcataatgattggttgctttaaaacattgcttactaaaatcgtaggaaaccaaggaaattaagaaaccagtgccttttccaagagtagttctttgagtttttttcaattttgcccatgattatttgtccactcaaattttctccttaatttgtacaacttacctattactaaaaattctcactcccctcctgaattttaaagttattggcctcaagtagtagacagtattggctcccagttgttctaagtttctctgaagaatcatgagcgcccagtggaggaaggtagttgcggggaattaggatgtataaaaagagaagaggtctaaaatgaggctcccacgcagtagtgtttaacatagaaacagggaatctgtgactaataaacaaaaggaatggctagagaaagaggcagaagatacagggtgacttaatccaagaaaaatccaaaagtggacagcagtaatgggcaattgagcacctgttactcatctacgcatcagcctctttagcaatgaccctttaaatgtgcctgagtttttaggggaaaggtgaacaggaatatcataaagacagagagagttgcttagagacagctacagagagcgcatttagagacagctatagagacagctatagtccttccaatggcgaaggtgacccagctcactattctgtatgtcacttcttgtgatcatatcttctcccttggttgtggttgcactgtgtatcattcttccagcctctgggtattttccctcccctgtccacgtgcctttccagatgtgtttacattttccagctctctctgcagctgtgtttctgagtttctgccaagctctgagaggatcatttactcattgtctccctccctccaaacttcattaaggaccaacaattctccaaccctgcaatagaaactctagaatctagaacctctcccaacacagggaaggacatttttgacagaggactgtccctaccctgggattttccttcttactcccagacatcatccctcttgcagtcagctggatgaaagcaccgcgtctcttcccctctcctcttgagtaccagtttctgatcccactcccaggctgcaagttgactttctgaattcatagagtcttacagtttccaggtggagggaaaaaaacaggttcatcaccctaaaatgacattctgtagggtaataggggacttggtcctcctcggggctgtatctgagagcatgcacctcattgcctatttcgccttcgtagaaaaccgcttatcaggccagaacactgaataccaaaagcattgtgttacatgaaagcgatgattcatgagaacagaaatgatatcctggagtttagcatggtcttgctcagtttatgagtggtaattattactgaaatatccctctgtgttgagacccctacaggcttacttctagcttgttaattctctcgctggtcatcagagcattttcttcacttaacgtgaacatcccttagctcccacgaaagtcgtatattgtccagatgtctgactcctggcttgagtaaaacagaacccaggctggccttcccagctttaccaacagtagaagggcccaggttttcagctccaaaagacaagcatcttctcctaaagtgttctcaccttttcatgggactgggccagtcttcccacctgagtcaggtttttttgttgttgtttttttaagacagagtttcgctcttgttgcccaggctggagtgcaatggcatgatttcagctcaccgcaacctctgtctcccgggttcaagtgattctcctgcctcagcctcccaagtagctggaattacaggcatccaccaccatgcccagctaattttgtatttttagtagagatggggtttctccacattggtcaggcttgtctcgaactccccacctcaggtgatccacccgccttggcctcccaaagtgctgagattacaggcgtgagccaccgtgcccagccagtctttttaaaaaaagaacccgtgatttagaatatatagccccattgtcaaacctaaatttgttctttttatcaccatgaccgtttcatgtagaaagcaataattcagcccctccggggctggtccagaagtcacccatttctatcatttacatttataaaagatcctgtgctagtcactgctcaccaatgtgccccacgcttagacttcataacaaaaccctcctattcactaagaatctagtcattcttcagagacaccaaaagtcttcaccctctctgatcgttcattttgaaggcagctagataataaccatggccctgagtgagatggtagggctgtttgctttggcataaaaaagaacattttgctttggcataactttctcatgaacaaaatctatcattccatcatgagaaataatttccaaagagtaaaccacccttggggtaaagaaacacactgaggcatacgtgacaaatactttgctgaggatggttctgggaaagagttgggcaagagaatcagggagctgggagtgttggagcgtgtgggagtggcgggaggaaagggtgagcgctgagagagaaaggaagtgcctggagtctgcctctgccgccctgtgaagtaagggctttgcctctgtggaagccatctcaggcatcattgagaggtgggcagggcatgcccaggtgggagctgaagttggagagaggcctctagaaatctgagggcagcttgaggctctgggaggggctgaggagcatcctgtcaaagagaaaagggagacaggataaagcacttttttttttttgagatggagtttttgctcttgtcgcccaggctggagtgcaatggcgcgatctctgctcactgcaacctcccaggttcaaacaattctcctgcctcagccttccaagtagctgggattacaggtgcgtggcaccacacctggctaatttttgtatttttagtagagatggggtttcaccatgttggcaaggctgatctcgaactcctgacctcgtgatctgcccgccttgcctaatgttatttttcatccctagaggattcacctcaagagcaacgcagggcaggtatttacacaggttaactgcttttcctgacttgtgtggccctaggatcaggtgtatcaaaagacatgaagatcatcctgggcagcatagtgacacctcatctttacaaaaaaatttaaaattagccaggcatactggtgcatgcctgtagtcctagttactcgggaggctgaggcaggaggatcacttgaacccaggagtttgaggctgcagtaagctatgatcaaaccactgcacaccagcctgggtgacagagtgagaccctatctctcaaaaaaaggaaaaaaaaggccaggcgtggtggctcatgcctgcaatcccagcactttgggaggctgagcggtggtggatcacctgggatcagaagttcgagaccaacctgaccaacgtggagaaaccccatctctactaaaaatacaaaattagctgggcatggtgacaggcatctgtaatcccagctacttgggaggctgaggcaggagaatcgcttgaacctgggaggtggaagttgcagtgagccaagatcgcgtcactgcactccagcttgggcgatgagcgaaactccatctcaaaaaaaaaaaaaaaaagacataaggcaaatttctaaagtgccagggatctgagtaaaaaaaattagtcattccaacatctacctattatgccatttccataataaaagcatctgatcgctttccagagcagtgagttctgactttggttagatagtccaatcagtctgtagactatgacatgctaaatctatgcaaatgtctttaggcaacagctacactgaaactatagctacctttctgtgtacgactttctcccttaggacacaaattttgcttcagtctcttccaggatgtcaggaggtagtctgtccatgatttaaaatagcttctattgcagtggaccgggccagctcacaggttgataaggaaggaggcgcattttcatattctacttcatggtttcctgcccttggtgtgggtcttcacagaaaggtaactaggattccaattatcttgctttaatcttggcattttaaatgtttatgcaaagaaagtacagctgactcattcatctgatcacttccaagagggagaggagaggctccgagtcaccagcccaagatccccaaggggccagtgcccagagccagtcctgcgagcatagccagaggatgatgtcagggcttcccaaagcaggtccttgtcatcacagccccgacgcgtctgcagggacaatagccagcacaccgctctccatcagctcccagccagcctcatgctggggaagattggagcggaggcccagggtcacaccacggagccaggagacttggtcattccagaggcagtcagataaggtgacctttgtccctctctgcatgggcttggcttgaaccaggaaggagagggagtggcatgccagcctttccacccacactcctcctactctgaggaagggccgcctttgctttcccagaaggaacctctcaggaccaaccagtttttctggttctggagttgtgctgacctttgcaaagctgaccagaggataaactgcctcccgggtggtctgtttatttttgatgatgttaaacttgagacaaacagatgctcctaccaaaaacaatagcaacaatagcaacaataacagcaagaaattattaatcacttacacgtcaggaactgggcccagtgctttccatatgttattacctaatcctcgaaaccctgaaagctagctattatgatgatgattcccattttatagatggggaaactgaggctcagagaggtcaaataacttgccaactgtcacgctatccctgaactggtagaaccaaaaagcaaactcaaatgcgtctgactccagaacccagggccttgtgggccacaccgaacaccacaggaggtgttcatgccaaaaggaagccactgctatgtacttacaggagcccctccactgttaaggtttttcccatcaacagcgacgagctaagtctatagctgtgtctgggctccctgccctttccctcatcttctgccctggcagtggcaaatctaaaccagtcacttgtagccctgaaagagtggtgattgacaggggcccccatggtgagatcttgtggcctggacagcgaccagtggtcctcagtgcagctgtcagtatgttctaacttggcacattgtgctttttagataccggagaggagtcatatttggggccttggcactcatcctggttgtttacgcaggtgtaaacccgtacgcgggatgtagttccatgcactcatggtttcctcatttcattgacttaagcaagggagactcctacaagcaatgtctctccaggggttggctcctaaaatagccctctcccctggctgaaagcacttctttgtcatcctccccaacccaagcatgctaatggccactctatcatttctcgtccacacgccccatcctttcattgtcagacgcgcccctctccctttctgctgtcctgtccaccgctgacagtcacttcaggctccattcaatcccacctcctccgggaggcttcttggacaacttcgcatcgctgtctcctctctgtaaccaccaccagcactcaccaggcagtctggcccgtgacagattctctgattgtgtcccatccagatacaaggatctcctttctcatggttttctgtctcttctcttagccatatcttatctgatcacacctcagcttgtctctgctcctcttaaaatgggaaggctggagttaaacgcaacaatttaggaatgctccgtccagccctggggaaagggggattgattacctacacctttattccagatactcaacttctagacttttcgacatcattcttgtgcttcgacctggggtcaccaaatgccaggtgtcagagtggaaagggctgattcactggtagtaacttcagggctgcaacaatctttccacccctttactgaggcaagtccgaattaaattcatcgggactctcccttcccagaatctcctgccttctttgttcctcaaaagcaagatgtcacagtcagtccctcagatctcaaaaattcagctattttgtggaattctggagacagccttagcatatgacctatgtatacgaagtaggctgggcgcggtggctcacgcctataatcccagcactttgggaggctacagcaggtggatcacgaggtcaggagatcgaaaccatcctggctaacacagtgaaaccctgtctctactaaaaatacaaaaaattagccagatgtggtggcaggtgcctgtaggaccagctacttgggaggttgagacaggagaattacttgaacccgggaggtggaggttgcagtgagtcgagattgtgccactgcactccagcctgggcaacagagcaagactccatctcaaaaaaaaaaaaacaaccaaatagtagagatgttggtcattttctgtgttacccctgccctacctatcccccaatcaaccaagcaggttgatgatgtaccataaaccatacaatggcttcacctgctgacttccaggaaagatgactaattctgccaccccctctaccaggtgagtctgagattccaacggctgatactgtggtcctagttcagtctcaaaataactgggtagacctgaccttacaatgtgttcatttattaaaaagaaatgagaaggctgggtgcagtggctcacgcctgtaatcccagcactttgggaggccgaggtgtgtggatcacctgaggtcaggagttcaagaccagcctggctaacatggtgaaaccctgtctccacaaaaatacaaaaattagctgggcatggtggcgcatgcctgtagtcccagctacttgggaggctgaggccagagaatcacttaaacctcggagggggagtttcagtgagttgagatcatgtcactgcactccagcctgggtgacagagcaagactccgtctcaaaaaaaagaaaaaagaaaaaaagaaagaaatgagaaaatgtgcccccttcctgaactattatgaagtctaacaaagttagctgtttttgctattgctgccactgctaggtaaactactcagccacctgctatttttattatttgctctctctctacttgaaacaatgaaattagggttttggggtcataagaggagaaaccaccctctctccccttctcttaacatttccacccatgttagaatatgtagattttgcaatttggttaatttcctctaatttgtacacatctgggaggtgataccctgtgtggagagaggaggagtctttgtcatgagaagtatcagatcagagaaggtccacatgcatttagactgaaggaagtgggcaggggaggtgacatcacaaagctctcagactgagggtcctgctgggcagagaagactggctgccctgagaggctgacaaagtcacatgcagggtctctgagagtgtgaatggcactggcccggggcacgtgccatgtggatcccaagaaaatgcagtgacttctagagtggggaacacttaaccccctaacccccatccacccacccacctactgcatgcctacctggccctcagtaatacacatgatccttttttttttttttttttttttttgagacacagtcttgttctgtcgcccgggctagagttcagtggtgtgatctctgctgactgcaaccactgcctcccgggttcaagcaattctcctgcctcagcctccggagtagctgggattacaggtgctcgccaccatgtctggctaatttttgtatttttagtagagacggggtttcaccatgttggccaggctggtctcgaattcctgacctcatgatccacctgcctcggcctcccaaagtgctgggattacaggcatgagccaccgtgcccagccacattaggcatttttctaaggtatgaatttctatgatgaacatgtattacttttatattcatggtaaagcgataatgacttttataaataaccttggagcagaaatgctcagccccaaacccttcccagttagtgggccgccccatgggcctgtgactggagtttccccctgccctgtccttgcacggcctccttcctgatgtgacacttggatgcctgtgagagggcctgtgacagatgccagcagtggtggcgatgacaagcccaaagccacatttgttccattacttccagctcctcgttgcctttgcaatccctgcggtgagagctcctttctcttatctgcacaaggcaagagtcaaaagttcttgtcagtgtgattgcagaatatcagactggaaaacttcctgataatacctaaattcctttagcgcagagcagtccctggactcgggtcaggagagctatgtggcttcagcacattgtgtactgtgcagctggataataaaccagatgaaatttggcaaataaaaatgtaaggatgtcattctagtcccatctggtgtgataacccctctcccacaccaatttgtctgttcccttagcaaaaccatgcaggcggcagaggaagagtctctgcttgtgtgagccattgaggaattccaaaatagacacaaagatatgaggaatacaaagaaatgccaaataataaaaaatgaggatcaagctgaggtttctgagacacatttatggcttttgtaaacagtcatgcattcgttgaatggctctttgggatgcactggtgacattagctaattctgacatttaggaatttaaacttagtagctgtcctagcttatccttattaacaaagtttgctaaacattgcgtgctgtgcgccctgctttatgtttgaagatgatgcaaatggcaggctgtcatctcgattccatctctcatcgtaaaacccgagggacacgggcgcatgctcccaccatgttttcctctggcctcattctgcacccagcattccctgttctttccttaccttccccagtttagtttcaaaaacatatgggttcccaaagaaaacaggaagaaatgcagaaacgtgaaaataaagtttaacaagtgatgatagacctttgatagagcactctttcctccatgccaaacaaaccgctttttataaaccaaataatttaaagtatagcttcactcttacctaaacttaaaacaaactggagagagagaggtgtatttttaatagaaatgacacatcgaagcatttccaaaaatgccctttgatgctcctaagccactgaccaagttcctggatttcaccccctcaggtaaccaggtgagtttctccaaatccacggatgcttttgcctttgaagaggacagcagcagcgatgggctttctccggatcagactcgaagtgaagacccccaaaactcagcgggatccccgccagacgctaaagcctcagataccccttcgacaggttctctggggacaaaccaggtaaaaaacaaaacaaacaaacgaaaaaagtaaaacagcatctcagtgtattatcgtttcagtcttaacatcaacactgttaacagctggttttgcttagagaatgcagagatgtccctggctgccacagcattttgatgcctcttctcactctattcagcgcaggcctctgtgtggggtgacaaaagctccagaaaacactgaaagagaacctccagaactacaccctttaacttatccattaagcatctgctctgccaagcagataccttttatctccatttttatggacaaactagctaagactcagtgagattggatgactcgccaacaatctcccagctagaaagtgccagagcaggactgattcaaagttcaccatctctctatgcactgaggactcactacggggctccagggagtggagagaaggaaacgctggctctctccaaggcagggaggcccacgttgcttctgcttttagcaggtttctacctagcaagctgcagcaaaattcagccccaacccaaccataacattcacctctttctgtacaaatctacaaacccttgagcatgaggaacatgtattgagaatactcttaaagcacatttataaagaataatgatgattatgggctgggcacggtggctcacgcctgcaatcccggcactttgggaggctgaggcgggcggatcacctgagatcaggagtgcaagaccagcctggccaacacggtgaaaccccgtctctactaaaaatacaaaaattagccgggcatggtggtgcgcgcctgtaatcccagctacttgggaggctgaggcaggagaatcacttgaaaccggaaggcagaggttgcagtgagctgagatcatgccactgcactccagcctgggcaacaagattgaaactccatctcaaagggggaaaaaaaaagaataatgatgattatgaacaacagttcctgctacatattaagtgctcactctgggccaggggcagtgccaagtgcatcacaaaagtttcctcatttgaaatcagagacccctccaagtaggtatcatcgaggttgattctgacagagaaggaactaaagctctgtgaggccgagcaactggtgggctctagaagtatggcagagtgtcagccacgccggggaaatccagccagaggtatggagcccttaagagagatgcacccgggcatccacatatgaggggaaggagatgcgtaagtgtgaaagccagatgtgagctcttccaactctgtctctatccagagagcccttcagaccctcagccccttccctttaccactcctggcctcacagaaattgtgcaatgaactgaaattagatacatttgaaagctgggttattttttcccactgaaaagtaccatacagatattagggacagttaaaataattatcattcagtgcctcgtttcccaaaaccatgccagttactgatcaccgtcatgcctatcttcaccccatcagagcaaacctaaagctgccaaggagaaaaagtgaaatgggaggaaaaagggaggcatggaaagctgagctgaatacttgtgtgtttattgtgcaagagtgtataatcaaagcatttttccttcccctgcatgccacagctggtctttgcagccaaatttctttgataacatcaaacggtgtatcagatcatttgtacacattattctgacagtaaattcctaagcttctgatttaagaatggtttgaggaaaaggcaagttcttttctgcttcaccttaggagaggggaagaagagaacaagcaccgaacaatgccaggcaagatgcaaaaatcattgtttgtcatttctcccggcaatcatgtttgacagatgaggacactgaggctccaagagaaaagaatcctttgggcctttgacaggtgccaggcagggctcagggaagaactgcaaagctcattcctcaccccccatggagagatcatgggcagccctggctcctttttgtcagagttgaaacagaggaatataggagagaaagagaaaataatttttccctttacagactctacctctggtaaaggtttcttatgactttatacacatgcatgcgcacgcacacacaaacacacacacagactcacatatgtatacacacaaaaccacatatacatatacatgcctgtgtgcacacatgtgcacacacacacacgtatacacctaacatgcacacacacatatatacacacatgctcataagcacgcatgcacgtacacacatacatgcacatataaacactcagacacacacttggagatacacacacacacttccaaacacacactttccctttttctgctaacatcctttttatctaccttgttcattgtcctactttccccccaaattcctacactcactcttccctgctgctctttttcaattgcattatcaagacaggtggaccttgtcacacacaggtggaacgcccacacaccgagaccagatgtcccagtttgcctagaacagaccagttttatacctgtcttttggaatcattacttagaatgattccctttctctctcaaaagtgttctcagctggatgataagtttatatatatatatgtatatatgtatatacacataaacatatttatatgtgtatacacatgtacatatatatacacacacacatatatacacacatatacgtatgtgactcctcccactgagggagtaggctgatatttacttgggtgagaagctaggatgaaagcagcagaggtatatatacggactctaacatttctgtgtcacacaacttattcctgtatcttcctaatatcggtaacatttggatttcaggatcttgcttctggctcagaaaatgacagaaatgactcagcctcacagcccagccaccagtcagatgcggggaagcaggggcttggcccccccagcacccccatagccgtgcatgctgctgtaaaggtacggacacatcagcctccaagccctgcctgagcgctcggctcacagagccgacttggagcagaactttctgagttaggtctgacaacacgaggagagttacacggaggacccaggcagaggttcagctcactaggagggtcacaaaacaggagatgagaaatgggtcaccatccttgcagcacagcagaagtcacctctgccacggagaaggctgtgggtttgcatttctttggaatcacagtccagccagcacgttccccacttaaaagatttcataagctcacctttgaggtagacacagctgattgtaaggcaggatttgcaagtttcataaaataggtatgcagcagttggattttatgcaagggaagtagccctgaaaagcttgcataacgtaaaacttacatcattcaagccagtcttcctatggaaataaccacggggtttcattcatagtaggcaggtagctagaatcattatagcaaatgtttagttttctcagcattatatctttttgttaatttttatttttatttcaatagttttgggggtgcaggtggtttttggttacacagagaagttctttagtggtgattttttttctttttcttttttcttttttgagacagagtctctctctgttgcccaggttggaatacagtggcgcgatctcagctcactgcaacctccgcctcccaggttcaagtgattctcctgcctcagcctcccgagtatctgggactacaggctcccgccaccatgcccggctaattttttgtgtttttcatagagatggggtttcactgtgttagccaggatggtcttcatctcctgacctcatgatccacctgccttggccttccaaagtgctgggattacaggcgtgagccactgcgcccggccctttagtggcgatttcggagattgtagtgcacccgtcacctgagcagtgtacactgtacacaatacggaatcttttatccctcaccccactcccaatcttcccccaatccccaaattccattacataattcttacgcctctgcatcctcatagcttagttcccacttataagtgagaacacatgatacttggttttccattcctgagttacttcacttagaataatggcctgcagctccatccaagtggctgcaaaagacattatttcattcctttttatggctgagtagcattccatgttgtatatgtaccacattttctttatccacttgttggttgatgggcacttcggttgggtccatatctttgcacttgcgactcgtgcttctataaacaccagcatcgcatctcacagtacacaggctgctctctcttcagttaattgcctggtaatcatgtggccttctttataatgttttatcccaaataacttccctttgtgttccttttttttttcttttgagatggagtttcactcttgttgcccaggctggagtgcagtggcgtgatctcagctcgtcgcaacctccgcctcccaggttcaagtgattctcctgcctcagcctccccagtagctgggagtataggtgcacaccaccatgcctggcaaattttgtatttttagtaaagacggggtttctccatgttggtcaggctgatcttgaactcctgacctcaggtaatccacctgcctcagcctcccagagtgctgggattacaggcgtaagccaccgtgcctggcctatacccaaataacttccaactgatttgggaacacgttttctcagctcgagtgccaccacttaatgaatgttaaaatgactcttacgggacttaaaaaagattgtaaattgaagtaaaaatcaatgatatagtaacagttttatggtctaatggatgatagacacttcagtttgccaataaggctcccccaccaaaccacaagagcttaaacccagctgacaattcactcagctcaacaggtcggaaattatgtgactatcaatgcattttgttcattgcaggggaaggaggaggagatgagtcccgttatttctaaagctgagtataaaaagaaatgttattcatatttctatcacagtatttaaattttgcataatttaagttagcagtggagcatggtggctcacgcctgtaatcccagcactttgggaggccgaggcgggcagatcacctgaggtcaggagttcgagaccagcctggccaatatggtgaaaccccgtctctaccaaaaaatacaaaaattagccggacgtggtggcgtgtgcctgtaatcccagctactcaggaggctgaggcaggataatcgcttgaacccaggagggggtggtggcagtgagccgagatcgcagtcactgcactctagcctggtcgacagagcgagactctgtatatatatataaaaaaaaaaaaaattagcaaagccttcaacctcactgtagtagaaagtatgatagaagcccaggagatgaacagatcgctttctgtgaaaaaggcgattcttacagacacccagctggtcccggcaggctggttgtttgtagaagagccatcatttcttctgcttggtcaacaaacacaaaaaccttagtgtcccctgggctcaaaaagagaatagtaatagtagcctttaccccagactatccagagtaaatggtccgatttcagtatcttctggaatgtgctaaggcaacatagagaaaaaaagctcctggacctccgacttagctgcgggaccctgccagggctgcagctcccatcctccccagacaaggcaagcctcagaatgaggcgacaacagcagctggtctggagcaggccagggcagagctggtttcgggagccctgcagaaactctccaaggacagaagactgattaactaactagaatgctaatcgattagtaagcagagagaaacggagccaccaaacacacccaactacttgtgttcattattcattagtcgccaggaagaagtctctttggaaaacaaaagagcctttgggggtgcattgcgctgagtccaagtgagttgtaagctcctttggataaggtcacattcagatgtgtagtttgtggttgaagtggggaacctgccaagtcagaatatgcttgccagctgttcaggagccccctcttctggacaccggtggaaacacactttccttccaatgttcccccaaatcctagctcactcgtggtcatgacatccgtgttcttcatttcaaccttctgtaataaagtcagggtttgaaaattattttttttttttgaggcggagtctcgctctatcacccaggctggagtgtagtggcgcaatctcggcttactgcaacctccacctcctgggttcaagctattctactgcctcaccctcccgagaagctgagactacaggcatctaccaccaagcccagctaattttttgtatttttaccagagacagggtttcaccatgttggccaggctggtctcgaactcctgacctcaagtgatgcgcccacctccgcctcccaaagtgctgggattacaggcatgagccaccgcgcccggcctgaaaattacttttttttaacctgataacaggatggacccattccttcctaatatacaaaggtcttttatttcaggagcaggttatagacataattacctgttcattgactacctgttattatttcaatattatcttttatagtctttatattgattagtgagagaaaaagtaaagaatattttctccaacttgcaggtgaggaaactgagatgtattaaagttaagtaattgtaccactttcaaaaatttgtcttatcttccaagactatacccttaacttcctgattcagtgtgtccaaatcatgcaatacatgctttgggttccaactctgggaagtgttccagttaggtggataacccttcccataataagtaaagtgtccttatttcaaaaggtgttacttcctgatctttcatcggtatttggcaggcaggcgagagggtgttcagcaggcagataggcaaggtttatcttactttcagctcaaagcaacaaataaccacattctagattttcaaagaaaatcttagttttatcttagtttatgtcattaataagtcgacttattaagtgtttaactaaaagtgactgcacatatgcatatgaaagttctttttttttttttttttttttttgagatggagtttcgctcttgttgcccaggctggagtgcaatggcgtgatctcggctcactgcaacctctgcctcctgggttcaagcaattctcctgcctcagtttcccgagtagctgggattacaggcgcctgacaccacacctggctactttttgtattttttgtagagaaggggtttcaccgtgttggtcaggctagtctcgaactcatgacttcaggtgatccacccgcctcggcctcccaaagtgttggcattggcattacaggtgtgagccatcgctcccagccatgaaagaactttctacaagtagtctcaagatcagaatgcaacctttgttaggtcatcagttggttttaggttaggagaatgcactcattgaaacacaggattacattttgctgtactccagaaaggaaaaactctggagctgcttctaagattcaacattccctgtctaaggagtgtccttccagtgtgatacatttgcaatggatttgttcattagcaacgttagtgtcctaggagctctttgtacatcatgcctttgctatattatatttctgagatccaagaatggccatcagacaaaactgcctcacaacgtgtccatgatgcaaaatcattctcagccatcacctaaagcacatgcaatttcctcatcttctttgcagtccaaatccttgggtgacagtaagaaccgccacaaaaagcccaaggaccccaagccaaaggtgaagaagcttaaatatcaccagtacattcccccagaccagaaggcagagaagtcccctccacctatggactcagcctacgctcggctgctccagcaacagcagctgttcctgcagctccaaatcctcagccagcagcagcagcagcagcaacaccgattcagctacctagggatgcaccaagctcagcttaagtaagtccggcaaggctgggagggtggctgtgggcagaggttgggaagggtgtctattaatatctatctgccagcaccatggggcctagcaagtcctgtattgcaccatttcctcatccagtatgtttggaaggtgactcaatttagaaactatgcacaccttttcagagccgtaagactgggaggaagcaaatacagggccctctatatctgcagatgtattccaaaccctcattggatccctgaaacctcagagagtactgaactctacatatactgtatttttcttaggcatatatacctgtgataaggtttcacttataaattaggcacagtgagagaataacaataatagctagcaataatgtagaacaattatagcaagatactgtaataaaaggtatctggatgtggtggtttctctctcaaaataacttattgtactggacacaactatttttgaactgcagttgacctcaggtaactgaaatcttgtaaagtgaaactgccaataggtggagggactgctataaatcaatgcccttgataagaggcccctttggggaaaaggaaagtattagcactttcaagttggactatggaaagtctaagaatgtgatattggaattatgagcaattccgatgcccttctgcttttagaaggaacagggctgagcagctgacagacactctcaaagattgactcctgagcccaggttgtgtgaccacattgctaggtcaccttttattttttttaaatatatttatttatttattcatttattttttcgagatggagtttcactcttgttgcccaggctggagtgcaatggcgcgatcttggctcaccgcaacctccgcctcccaggttcaagcgattctcctgcctcagcctccctagtagctaggattacaggcatgcgccaccacgcccggctaattttgtatttttagtagagacagggtctctccacgttggtcaggctggtctcaaactcccaacctcaggtgatccacccgcctcggcctcccaaagtgctcggattacaggcatgagccaccgtgcctggccaggtcaccctttaaattgtcaatatccccacatataaagttgagatgtagattcctcctgtgtcatcctcagactatatactagcaattatgctgagcactaaacgcaaccaagcttcaccaggtgtgtttggcctccccaggacagagcatcagctgaatcacaggtggatgtgtcctctttcatatgccaaagtccctgccactccctcttatctccctaaacaaagttcagatgtcacgcaccgcttaccgtctagccggcagtgttgtttttcctcaccctggtctcttctgctggtttattacatgcctgacccttgcaggcaatcactttgggatccgatctaaatgcaagttatcccaccaatatttgattgtacttgaaatgcctctttgtttgttttttagggaaccaaatgaacagatggtcagaaatccaaactcttcttcaacgccactgagcaatacccccttgtctcctgtcaaaaacagtttttctggacaaactggtgtctcttctttcaaaccaggcccactcccacctaacctggatgatctgaaggtataggatttgacatgagtttctttctttttttaaacaaatacaacagtatgttgttaacatcaccaggaccaactgatatctggagtaagagagtgggaggggaagaagactgtaggaaacactgaaggaggtgacagaatttatcctgctgtggttgaacaccccagttgtctagtccattttatgcagccgtaacaggatactggaaactgggaaatttgaaaagaaaaggaatttatttctcacagttctagaactgagaagtccgaggacatggcaccagtatctggcaaatgccatcccatggtagaagggcagaaggtggaagggcaagaaagggcaagagccctttcttttgagatagagggaaaagacaaactttatgtttattttaccatagcaaaaaataatttttaagtaggctatttctagataagagtaagacaggagacaagtgagacaggagatgctttagccaaagagaaacatgatccagatatgatagtgccatctgtcagacccctcaaaacccacttttgggaggctgaggcaggtggatccctctagatacacatgctcagaatcattggctggtgagagttacggtaattagtataggtataaggagatgatgatgatgatggtgcctacctttttttttttttttttttgagatggagtcttgctctgtcatccaggctggagtgcagtggcacaatcttggctcactgcaagctctgcttcccggcttcaagcgattctcctgccttagcttccctagtagctgggactacaggcacctaccactacacccagctaatttttgtatttttagtagagacagggtttcaccagttggccaggctggtctcgaactcctgacctcaggtgatccaccggccttggcctcccaaagtgctgggattacaggcatgagccaccctgcccagcccctaccaattttttttttttttaaatataaaccatctgtcattcattctgtgtagatttgctttaattttcaccctgcaagataagttttgtctccccaatttaaaaagtgaaaataaaaaccagaatcataaagaggtcaaatgataggcagtttaaccagcttatgaatgacaaaactgaggcttaaagctaagtaacttatttcaagggctttgctattgtatgagacgtgagtggaaagagagagatgggcaggagagaacgtggctggacttgaccactcactgtgtgtatggggagaggcgccatctgagtcttgggagagtgacatcaatgacagaaggagagtagaatgaggagttgatgtgaagggacagtggcaagttcattcagtttgggaaagtcaagtcgcgggtaccagcaggacaaccgagagaaaagtcatccatttccatcagtaagaattagccaggctgtcttgtcaggggtgggaaaagaaatttcagactcatgtgcgacgtgtggagcattgaacctagaagggtgaatgagattgacaaagaacaaaatggaaagagtgagaaggaaagagagaagaggaatgaaggaggcatatgatgcaaccacaattgaggaaagggagaaataagaggaatggatgaaggtgaccccgctaatagtaatcagaaaggtcatataatgaaggtgacatttgcaagcaattttcatgttttgctacacaaaaggaaaagaacactgagagaaaagtctttgatttctttttgaaaagttcatggttatatatcacagtatgtggataattttttggatcctatttaaaaaaaaaaaaaactggctgggcgtggtggctcacgcctataatcgcagcactttgggtgctgcggtaggcggatcatgaagtcaagagatcaagaccagcctgaccaacacggtgaaaccccatctctacgaaaaatataaaaattagctgggcgtggtggtgcacgcctgtaatccagctactcgggaggctgaggcgggagaatcgcttgaacccgggaggtggaggttgcagtgagccaagatcgtgtcactgcactctagcctgatgacagagcttgactccgtctcaaaaaaaaaaaaaaaaaacaaaaaaacaaaaaaactggagagagagagaaagagagagactgaaagtttaaaaaactgagagaataccttattgatattaagaaataataattcatattttaaggtgtgataatgttattatattatggctttttaagagtacttatctttcagagatagagaccaaattatttggatgaaattatgtatgctttgcttcaaaataattcaggaaaggtaggagaagtgggttggagtatagaagaaacaagattgggcatgagtgataattgttgaagtttgttgatgagtatatgaggttcattagactttctatctacttttgtgtatgtgtgaatttttccataatagtttaaaaagttattagtgatgaaaacactagtgaatgtagggaagaggtgtatataaacctttgtcctgaacaagcgcatacagtgtaatattctgaagtttaaggtaaattaaactcaactgtattcatttttagaatatgagctacattatttaataatgtagttaaattattcagtggcaagacagattctaaaaataaatgtagaactcatcaattttaagtaattcaaaattaaaacaataatgagttgccattttgtactttttcaaaccagcaaatctaaaagaaaatgataaaacaattccagcaagactatagggtaaataaataattgctaatgtaagttaattcaatcctttccttttagctgattataaagtaacatatattgactgttgaaatatgatagtgtgtagaaaagtaaacagtattttgaaagataagactaacagaaagcagattatatttccttctaggtttaaaatgcatataaacattttgttttaaaataattgtcttgaaaaaattacgtgcacataaattactggcatacttcttttcttaacacatcgtgaacatttttcataactgttaatattcaataaattttttatttttaatagcagcatatcacttcaccacctagttaacattccactgctggacacttcactagctaccagatttttgctattcaaaacgtgatttcaggcggggcgcagtggctcacgcctgtaatcctagcgtttgggaggccaaggtgggcggatcgcttgaggtcaggtgttcaaaaccagcatggccaacatggtgaaaccccatctctactaaaaatacaaaaaattagccgggtgtggtggtgcacacctgtaatctcagctactcaggaggctgaggcaggggaattgcttgaacccaggagacggaggttgcagtgagctgagatcgcaccactacactccagcctgggtgacagagcgagactctgtctcaaaacttatatatatatatgtatgtatatacatatgtatatgtatatatacaaaacctatatatatgtgtgtatatatatacacatgtctcaaaacctatatatacgtgtgtatatatacacacgtatatatacacatatgtatatacacatacatatgtgtatatatgtatacatatgtgtatatatatgtgtgtgtgtatatatatatatgatttcagtgatctttgtgcctacatttattagtttctctgattatttcctcaggctagaataaaattcctgaattaaatatattaatattgtttaaagttttttgtttgtttgtttgtttgtttttgagacggaggctcgctctgtcgcccaggctggagtgcagtggccggatctcggctcactgcaagctccgccttccgggttcacgcctttctcctgcctcagcctcccgaatagctgggactacaggcgcccgccatcatgcccagctaattttttgtatttttagtagagacggggtttcaccgtggtctcgatctcctgacctcgtgatccgcccgcctcggcctcccaaagttctgggattacaggagtgagccacggcgcccggctaaagtttttgatacatattaaaatttctgccgtgaacatttatgtgtctgttcccagaagcagcaagtcgaagcagcacttctcaaacattaatgtgtgaactgaatcacctgagctcttggtagcatgaagattctgatttaggtctggggaggggcccaagattctgcatttccaactagctcccaggcgatgctgatgttgcttgtctaaggaccatactttgaatagcaatgtaataaagagctttacaaacacgttgtaattttgggccgggcgctatggctcacgcctgtaatcccagcactttgggaggctgaggtgagtggatcatctaaggtcaggagttccagaccagcctggccaacatggtgaaaccccgtctctacttaaaatacaaaaattagcccggtgtggtggtgcgtgcctgtaatcccagctactcgggaggctgaggcgggagaattgcttgaacccgggaggtggaggttgcagtgagccgagattatgccgctgcactccagcctgaccaacagagcaagactccgcctcaaaaaaaaactaatttaatttttgccgctacttaactaacacaaagtcttcttattcatttgccaacttaatcaatacaaatagatatatattcattagattttcatttcttggattactaatgatgatatacatacattactgtccatattttaaattttatttcgtttctgaaaagctggatcatatatcccttgctcatttttatactgggtatcaatcttctttttaatcaattagcacacttgatacattgagctttttaacactttattatttgtgtcacaattcatttttcccaagatagctatttgtatttgcgctttgtagtttcttgacttacagaagttttaaattttgttttcaatatttttctcaaactatcttttcctacagagtatcagaatatttccctatagtcttctgttttatgaaattattgacatttaggtatttaatatgtttcctgttttaattacaaacgtaatacgtttatgtggcatatttagaacatacagataaggagaaccgttgttaacattttagcatatttttatctggatttttcatatgcaaacataggttcaaatatatatatgtatatatatatgtacatacattgtttatataatttttagaaaaatagtcaattcaaactttgttcacttgttactataccacaacaattaatcatccaatgtcagcaaatatttatagcatcagctttaatggatctgtagtgtcccatcatttgcatacactatcatttacctaaccacttctcatatttgtagatatttagagtttccagtttatgaacattataaaaaatacagggataagataattacaagtgaattaacataataatattagtaaaactttatattgcacaacaatttgccaggcactattccaagtgctttatacattttaagccattttaaccctcacaaaaatgcataaagtaagcattatttcctccatttcccagaagggaaactgaggcacggagtgattgatcactgagttagtaacagacagggccaggagttgaactgatggtcttatcgccacatactctctcagtatacgactattattcagctggtcattacaattaggacataaacgtttatatggagccgtggttctcaaagtcaggtcggggcaccacctgaggacttgttagaaatgcgtatcaactgggtcagaaaccccacagtggggccctgcagtctgctttgtaacacaccctccagtggttctggcgcatgttcaggtttgaggaagagaacgtggtaggaagagccctcaccaaggaagccagaaaagctgcagactttgctgtacttcaagactattgttggagggcttgtgtctaaacccaggcagatatgttttctcatctataaaatggggacacagatcgccatgagggatgacgggcagtagattagatgacttctaccattcattcaagctctacatttctatgactctaaggccatgaaaacaccgtatacgataaagttaaaaataattgttaaaattgtgcagaactgatttatatcaggggtaggagaggaaatcggaaagaagtataaaaaagaggtgggtattgtagaattccatttgtgatgttttgaagctaattgtataatgaatacacttttaaaaatattgtcgttaaacagcacactaaccacattctgatttctttaggtctctgaattaagacaacagcttcgaattcggggcttgcctgtgtcaggcaccaaaacggctctcatggaccggcttcgacccttccaggactgctctggcaacccagtgccgaactttggggatataacgactgtcacttttcctgtcacacccaacacgctgcccaattaccagtcttcctcttctaccagtgccctgtccaacggcttctaccactttggcagcaccagctccagccccccgatctccccagcctcctctgacctgtcagtcgctgggtccctgccggacaccttcaatgatgcctccccctccttcggcctgcacccgtccccagtccacgtgtgcacggaggaaagtctcatgagcagcctgaatgggggctctgttccttctgagctggatgggctggactccgagaaggacaagatgctggtggagaagcagaaggtgatcaatgaactcacctggaaactccagcaagagcagaggcaggtggaggagctgaggatgcagcttcagaagcagaaaaggaataactgttcagagaagaagccgctgcctttcctggctgcctccatcaagcaggaagaggctgtctccagctgtccttttgcatcccaagtacctgtgaaaagacaaagcagcagctcagagtgtcacccaccggcttgtgaagctgctcaactccagcctcttggaaatgctcattgtgtggagtcctcagatcaaaccaatgtactttcttccacatttctcagcccccagtgttcccctcagcattcaccgctgggggctgtgaaaagcccacagcacatcagtttgcccccatcacccaacaaccctcactttctgccctcatcctccggggcccagggagaagggcacagggtctcctcgcccatcagcagccaggtgtgcactgcacaggtaagagcaccttgcgccatgcctggtgcacacttctttctggaagtgggttacaaattttcaactgctaaagagctaatgtcagaattttcaatgggaagggtttaccaaaagcatagcagaatctcccagacactacaatccttgaatcctcatggtagaccaaactcactcatcctctaaggcaggggttggcaaacttactctgtaaagggcgagatggtaaatattttttgctttgcaggtcacactgtctgtgtcatacctacccaattttgcctttgtttcacaaaagcagccatagatatcatgtgagcaaatgcacatggctctgtcccaataaaactttattttaaaaaatagtcagtgagcaagacttggcttgtgggctgcagtttgctgaccgctgttctcaggattcccaggattcctcggtgtccaaccttatcataggccaaaccaatgcctcaaaggtttaaaggggaaatcatcagatcttactcttcatgtaatggtctgcatagtgcaaacatttactgagcacctactatgtgccaggccccgttctcatctctgggacttagtgctgaactagccaaacaaaaatttctattctcatgggaacagagacagtttaaaagtaaattaaacaatttcaaagttaattatgtactatattagaagatgacacatcttatggagaaaaagcaaagaggtgtgtgtgtgtgtatgtgtgtgtgtgtgtgtgtagtttggaagtttgcaactgtttttttgagatagagtctcgctctgtcacccaggctagagtgcagtggcgtgatcttggctcactgcaacctctgcctcccgggttcaagcgatttttctgcgtcagcctcccgagtagctgggactacaggcgcacaccaccatgcctggctatttttgtatttttagtagagacagagtttcaccatgttggccaggctggtctctaactcctgacctcgtgatccgcccgccttggcctcccaaagtgctgggattacaggcgtgagccaccatgcccagccggaaatttgcaactttaaatagaagagccagggacgtttagcaaaaccttgaaagcagtaaaaagaaaatgtcgtggatatttggggtgaaggcattgaaggcaaacgagaaatagcacttgcaggggccctgaggttggaacttgtagggactgttcaaggatcagaaaaagggccagtggccggagcagaatggaagtggtcataggagatggcttagaagactcactaactcaaagactaggcaaaggtgactgacaaagactttatgctcatgagctgaagaattactaggaaagcctatgtaagtcaagttgagaaaggttacattatcaaaaggttctgacatcaccattattagaaaaggaatcagaagaaaacttacattaactgaatacctgctaagtgccaagcattacaaggcatgtctatgagtaatctcagttattgccacaagaaacctatgagctccaatgtattattctttatttgtcattgaggaaaatgaggctcagagagcttaaattagttacccaggatcacatgaacccaagatttgttaattctaagtacaatgccctattcaagtggaatatctccaccccaagaatgtgaagtgtggcaaaaggtaacgagaagtaatttttacaaacctacaggaacaatgcattccaatgaatgatgtctactacccctgaggggcactgtgggagaaattaggacctaaaaaacttattgtcataattaacaaacatttattgagtgtgtagtgtcctgggaaacaaaggtaaaaatagctcttgagacacagctctggaccaaaaatttcagtactgatgatactgctgctaacgttgcacagtgatttatggttcacaaagactctttgaagacattaaaaatttcatgataaaatgataaagaacaggccaggcgcactggctcacacctgtaatcctagcactttgggaggccgaggtgggcggatcacaaggtcaagagttcgagaccagcctggccaacacagtgaaaccccatctctactaaaaatacaaaaattaggccaggcacagtggctcatgcctgtaatcccagcactttggaggccaagcgagtggatcacaaggtcaggagtttgagaccagcctagccaatatggtgaaaccccatttctactaaaaatacaaaaattaggccaggcgcgatggttcatgcctgtaatcccagcttgagaggctgaggcgggtggatcacgaggtcaggagatagagaccagcctggccaatatggtgagaccccatctctactaaaagtacaaaaattagccgggcgtggtggcacgcgcctgtagtcctagctactagggatgctgaggtaagggaatagcctgaacctgggaggcagaggttgcagtgagccgagatcgcaccactgcactgcagcccgggcgacagagtgagactccgtctaaaaataaatgaataaaataaaaaaataaagaacaatataggttaacaatgactgatctatgcttacaacattaaatgctggtgggagggagggacagattgattagaaagggctggaaaggtccaggaagctttcatgaaggggttggacttgacaggaagtgtcacgttaaaaagtagagggccaggaaagggacaaggtagggggatggaatgtacagggcatgctgccggaggtccatggcgggaatagtagaacttaagcttgcagaagtaaatagcaccaaagtgtagagtcttgaacacccatccggtttgaaagcggaaatcctatgatgtggatacctggagccactggaagtttctgagcagtaggtgatgtctaaaaagccagattttaggcaagttcatctggtaatggaatttaggaaggtttgtaaaaatgacaccaggggacacagggcaggaaccagaattgtcagcaaaggtcacactcaagtaagctgctgctggccatgtaatttgtcacttcttcctttgcagaactcaggagcacacgatggccatcctccaagcttctctccccattcttccagcctccacccgcccttctctggagcccaagcagacagcagtcatggtgccgggggaaacccttgtcccaaaagcccatgtgtacagcaaaaggtaggcacctgaaaaaaggcctcaacctgggattcactttgcctcttctctcttctgtaacccgggaggcagaagttgcagtgagccgagatcgcaccactgcactccagcccaggtgacagagcgagactgcatctcaaaaaaaaaaaaaaaaaaagaataaaataaaaaaataaagaacaatataggttaacaatgactgatctatgcttacaacattaaatgctggtgggagggagggacagattgattagaaagggctggaataggtcctccaaagtgaaaaataatgaagttccctttcaaggcagaagtaaatttcattctagagagaaacaaatccactccaaatgcatctaaaaggatgtacagatatgagttagaagttttcccaaggagtcatttcctggggtcatcccagaaatcatgatgactaaaatggccatatgtttgcaaaacaacttgaacagtaaaccagtttctgtgaagttaaagattgggatcagggtgtgtgggaaacaacattggaggaagagagagggacacagatccatggacaggattggagagatgtgcaaagcaggggtcacagtgcaatatctttatggaaaaggaagagatatcacccttcagctggtggaagaagtcaggggtatgaaggatccagggtatggagagtctcaaggggcaaagaagaggtggcagaaaggagacaaacaagataagcctgacataaaagtgccacataccacaagtcggaaggggcagagaccctgaattgggccaggcactccacaggagaacacactcaaaataaacaaagctggttcataaagagacctcagcaatgcctccagctctctgcaaaatacccagtttggaataaatgacctgtggggtagattagtctggaaattcctgggttgattattttttatttattatttatttatttttgagacacagtctcactctgtcggccagactggagtgcagtggcgcgatctcggctcactgcaacctccacctcccaggttcaagcgattcttccgcctcagcctcccaagtagctgggattacaggcgcaccaccatgcctggctaatttttttatttttagtgagatggggtttcaccatgttggccaggctgctctcgaactcctgacctcaggtgatctgcccacctcggcctcccaaagtgctagtattacagctatgagccatcacgcctagcctgatctgtttgtattgaattggactgttacttattttcccctaaaataagagggtgcaccttaaggaggaaaatagatcttgcaaggttgccattctaagacgccaccaccaatgaacccacagtagcattcactactgttaatatatgggagttattttctaagccctggacttttcttttttcctcttagatcaatttttccaaaatttagcctgttgtttctagaacagaaacaacataatttcagatccatgaattcaatgcctttcttcatattttacccatgcagatggctggtttacactcttctgataaggtggggccaaagttttcaattccatccccaactttttctaagtcaagttcagcaatttcagaggtaacacagcctccatcctatgaagatgccgtaaagcaggtaaccatgtgatttgttctttatggaagaatagactgactcaatgaacagacattgtttgatatgattaaacttcacgcagtttgtaaattctgatattgagtgtgtcatgtgccataccaccaaaataagcaaattatctagacaataattggaaaacagtgttgcatgtgtagctgtgtgaggcagggagagaagagggtcacctgtctggctttggtaccagttctgccatctgccagctgccactgtcactaaggtgaatacttcacctctcttatgcaaaatagggataatatttacttggtaaggattctagatagcctcgcacttaccacattgttcaggcacataataccttctcaaatagatgagagtgactgtcagggtaatacttcctaaggttctccctggctttaaaattcagtgaccctggcaaaacactgacgggtattgaagctggataataaatgcaaggaggttcactgtatcctctactttcatttggatttggaaagtctcaaaattaaaaagtaagaaaaagaaaaaacaaggctgggtctggtggctcacacctgtaatcccagcactttgggaggccaaggtgagtggatcacctgaggtcaggagtttgagaccagcctgaccaacatggtgagaccccatctctactaaaaatacaaaaattagctgggtgtggtggtgtgtgcctgtaatcccagctactctggaggctgaggcaggagaattgcttgaacctgggaggtggagttgcagtgagccgagtttgtagcactgtactccagcccgggtgacaagagcaaaactccatctcaaaaaaaaaagaaaaagaaaaagagaaacaattaatgatcccctatttcaaatagtctgagcttggataaggtattcgatagcccttcatatgtgctcaacccagagaagaacatttacatcaattgctacatatgggtatcccacagatcaaagtcagcctgcagttaagttttgtttggcttaaagaatgttttaaataacaggagatggtatgcagagtgggctttctcatttctaaaaaattagaggatctggcaaaccaggagccacactgctgcgagacaacaattgcctaaaccaaggttcttttgctactttgagccacagctatgctctgctctctgcctctttttcttattctatattcagttcatttccattacctgccagacccttaggcatctggtaccttctgaactgataaatgactcattttttggtcagtgctcccatccatattgattaccgatacctatgtttattgagtctgggctctcagaggagtgagatggatatatgcctttgttctccccattcctctcccctggtttctgtaaacatcagccgattcttcagtttcaaaagaaaagggccaggcaaagtggacatccagaaataagactctactgagatgagccagagaggagggggcataccctactggtgtctacaggttcctcaagctactgccatgaggaaccatcaaaatatgagccaagttcttgagccacattggagcaaccaagcaagaggtagattcaggtcacttcaaagtaagagcgtaaaaagacattttctatttattaagatgtcctgctcctgggatgaaaacccctcaaacaactgaaccgactctaaagtaccctgtgctagaaagcattctgccttctttttcccttctcctgttgtagtagactgtttcattcagtagattatctgcctaaaattactactgaagcttaatcagacatggtttaaaaatttttaggcaatagacctatgttcatagcagcattattcactgtagcccaaaggtagaaacaacccatatgttcattgacaaatgaatggataaacaacatgtgttatatctatacaatggaattttattcagtctttaaaaaaaagaaattctgacacatgtcacaacatagatcaaccttaaggacattacgcttagggaaataagctagttgcaaaagaataaatactgtacgattcgcttctatgagggacttagatagaatagtcaaattcgtaaaggcagaaaggaaaatggcggttgccaggggctaaaggatggggtgtgggaaattatggttgaatgggtacacgattttagtcttgcaggatgaaaagaattctgaagacagatggtggtgatggtcacacaattgtgtgaatgtacttaatgccccttaactgtacacttaaaaatggttgatagtaaatttaaagttatgtgtattttgccacaattggaaaaaaaaataccttgaccaaacctagttcaaaatcttgcagtgctgcttctaatgatttcctacggagataaccaccttctaaattgtctgtcctcctttggttaatttgtaatagcaaatgacccggagtcagcagatggatgaactcctggacgtgcttattgaaagcggaggtaagactgcctgtgtcctgtccattaggacattctgagcccacatgaactctaaggaatgaactctcggtaccaagatcagatgcacactgtgagttggatgtaccaggtagtcctcagggagagccatttcctttgagcttctcgcacatttttagagctgataaaagaaggcttagtggatgattcctcactgcctttgtcctaggagcatttttcagcaatcattttaatagttttcatgtttcagcctaatccttgtttccttaagtgttttctcttgctgcacttcttctttctatgttctaatctcaatgcccctaccttctcaattataataaaagaaaaaagcagataatgaacattttgtgctacctactcaaagtgaaattcaattagcaaccttccactggatggttcattcatgcttaaatgttatacatgctagcaataaaacataatcagcatgttctttttgtcaccttttaatttgttcatttatttacttaaaaaattatggagtgtgtacctagaattttaaaccacacaaatgaataagatgacctaaggagcatgtgtagatcaaaataaaagcactcagggaggaatccttaagccaaaaacatttaaaatttcagagacggaggtagcaaaggactcagagaaggggtagccaggcgttgtcatagtctccgtgctatgatcagacaagatcctgattcctatggagtttacagtctggtaagggagacagacaacaagcaagtgaacagacctttcctccattgtagcaagagggaagaaggaagagatgggtacaaacatatgtatgtaaatgagttctgtaatggaaagatgagaagagttcatatcagatgcccatacacacacacacacacacacacacacacacacacacacacacacacatttttgagacggagtctcactctgtcgccaggctggagtgcagtggcgggatcttgggtcactgcgacctccgcctcctgggatcaagcgattctcctgcctcagcctcccaagtagctgggactacaggcgcgtgccaccacgcccagctaattttttgtatgtttagtagagacggggtttcaccatgttggccaggatggtctcaatctcttgacctcgtgatctgcccacctaggcctcccaaagtgctgggattaaaggcgtgagccaccacgcccagcctgcccttgtatatttttaatgaaatatgtggcaaggccagaaaagcgtgaggatgcagaaggggagtgtggaagattcaggggaagaagagcagttatgacttaatcatgaatgaactgagttttctggagaaacacagctgggttgttttgcagtcttaaatgccagttgtaggtctgacctcagaaatctaaagtgaaaccaagtcagcttagttgtttaatttttctcttgcaatgttctgctgatccagagcatgctcagcgaaggcagatgatcaggttcctccaggtgtggggttctgccaaaaatacaggctagacaaggaaagaagtgaagaccagaggggctggtggacagtgataacatagtagagtctatggattagtgtgactgtaaatggttgggaaattattgttacaaggtacataataagtggcttggagggttgggagaggatggacagagaatagaaaatatagcttgaaagtgagctttcagagggatgcagtatttggagatgacacaatccaaggtgtgtctgacagagtggcagtgggggaatcactggagttgaggaggaagtcgggagctcagaggccagcatgaacactgtgatttccaaggatgctcaggttacagaatgagaagggttcaagtggggaaaaggcaatggagtaggaagcagagttttcagtagatgagggggagtgaccaggaggctaggggtgaggcattgctgtcaccctcaaaacccaaaactgctgagttgtcatcagaagcggggggagtagcaatcagaaagtggcaatggcatggcgcctggtccctcatcttcaggccctcactgatggtgttgggatggactcagtgtcctcaagggactaccaggggtcagaggagtaggccaggaaccttcagagaagagagtttaataatcacagagtggaattcccaagaggaaagggtttgggaaaaaccagagggaagatgaattggagattgatagagcagcttagagatgagactgggtggtgagcggtgaccagggaagcgtggccatcttctgtatctaagtgtaactcactcatattgtgtggcatgctcaatttgaagtgatttaacaagtcacatcgtgtattgcccacagaaatgccagcagacgctagagaggatcactcatgtcttcaaaaagtcccaaagatacccagatcttcccgaagtccaactgctgtcctcaccaagccctcggcttcctttgaacaagcctcttcaggcagccagatcccctttgatccctatgccaccgacagtgatgagcatcttgaagtcttattaaattcccagagccccctaggaaagatgagtgatgtcacccttctaaaaattgggagcgaagagcctcactttgatgggataatggatggattctctgggaaggctgcagaagacctcttcaatgcacatgagatcttgccaggccccctctctccaatgcagacacagttttcaccctcttctgtggacagcaatgggctgcagttaagcttcactgaatctccctgggaaaccatggagtggctggacctcactccgccaaattccacaccaggctttagcgccctcaccaccagcagccccagcatcttcaacatcgatttcctggatgtcactgatctcaatttgaattcttccatggaccttcacttgcagcagtggtagaatgcccaatgcaccagtgctatggaagaccaatggagttccatgggggaaagcacacagccatacatactttactgtccaaaaacagaagaagaagaagagaattaaaaagaagcaatgatttctgtgccaatgaacaagaacaaaagtcatttttagaaatacatatactgtaatatttaccaacagtcagtaactgttaatgatttcaacaatgcattaaaagaatgtgctttctcagattaaggatgccaaaaaagatatttcactgccttttcaaagaccagtatattttctagcccataatttttctcaggcattgttggggcataagctcacactgtaagcttttctcatgaattcactagacataacgtggaaggaaaacgtagtcttttgggagtacagggaagccagcccctcaaagcttatggaagacatacctgcaatggaagctgttgcccaatgtctccattactatctttcaaaagagaagccagacccagcttcagatcaaaagttcttgagacagaggaacaaaaccaatcgatttccagggaagctaatcaactctcttttccctctaccacaaaactgccctgctggagtggttctgaacctgtacccaggactcgatgtggtcactaataacaattaacctgaactgagtccacagaactccactcggaactttcttcttttttaactagtggcccaatcattcccaccatctctgtgctgataagtacgtgtcctagatgagaaccctgaagaatgcagaccttcttcccccgaaggagatgccacaagctctccaacacagccccctttagttccaaagactagagatgaccacattggtagaagtatatctcgaggcacaggaagggagccccaccagggataattcagacaggactagagaataacatcatttcacataccctgggataaacaccctgggttcctatagaaggactattacttatgggagtccaacttctccttttgttttgttattatcagtttatctttctcccactccacttttccttcaaggtaccaatcctttcctgttcctcgtttggccatctttctttttctgcctccacattgggaggggaggacttctcagttctaacaagctgccatactcctaagaaagccatttttgaaaaatttaacaatccaggttcttctggagaactcattctccacacgcacagtttgctgcaaaaggaagttgcaagaatttcttgaggaagaaactggtgacttggtccatcagtcacgaagttctttctattctcgtttagttttcaagaaattattggtttgtgttgctctggggaaattggaaatcattacattgtaaagacaaatatggatgatatttacaagagagaatttcagatctgggtttttgaaagaaaacagaattgcgcattgaaaacgatggaaggaaaaagacaatggtctaatgtgcattcctcattacctctcgtggctttggctgggagttggaaaaagctaaaatttcagaacagtctctgtaaggctctctgtggctccagttcaccattttatattgttgcatgctgtagaaaggagctattgctgttgttttgtttttttatttaaatcactaaggcactgtttttatcttttgtaaaaaaaaaaaaaaagttgttcactgtgcacttatagaaaaaataatcaaaaatgttgggattttagaagctctctttttgataaaccaaagatttagaagtcattccattgttaacttgtaaaaatgtgtgaacacagagagtttttggtgattgctactctgaaagctgccagatcttattctgggggtgggatgtggaggaatacacatacacacacaaacatacatgtatgtataatagatatatacatatgtgtatattatatctgtgtgtgcatgtatctccaaaagcggcgttacagagttctacaccaaaagcctttaacccttaatctgctgtgaatgatacctggcctttctcactatgaatttctgattaaccaaccagactacacgttgcctctctgtgtatgactaacggctccaacccgatgactcacagctacttgcttatcgtgaacaagctcatcttggcaatgaatatggatgtgaaaagacagaacagcttcaccattagtagctggaaatggtatcacagtctcttatagaggaatatgaaaggaacaagaaaatcattttacattccttttatctgtattgtgctttaaaagatccacatggtaaattttttattttgcttttatgtcagtcatcagaaccaaaaaaatccagaagaaaaaattgccagtgtttcctttgaagatgaagctactggggaagaaaaccttattaatacactccacacatttgttcattcctcagctgttggtgttttcttggggtcttgacaaagcttgctggtcagtgcacttttcaggtgtcacgttttgctgtttgtatgttttttcttccccttacttcctttggaaaacaaactcacacagtgcccctactctgagacctgggactgagtgttaattattttttccttgggtatttctatctgagagactagacctagttaggaggcctctgtacttctccagattgtacctttttatggggatctttgaggctatgacccaggactgatagatatgccttacggaagacaaaagataaaatggttcctatatcctaatgcaaaccaacacagttaaaagagcagatctctggataactgctctcaacctgcttctacagtctccacaaaccgcattcaccctctctcttcatagctcagacatgaaatttgagggagaaaactggagataattgggagaaaattgatgaagttggctgcttccagtagatcagataatccatgaatttgtctcccattgagaattttattttaaattcttttaaactcttcgttgtgtcttttgtgatgacaaatcaggcatgactaaaagatgtacagagacttacgaagatggtcacattcaagttccctaatgctcttagaacctgaagatgaccatgtgtagttttcttaagacctctgaacccccatggtgatgaagacttgaagacatttgcagctatctgctgcagtctggtagattcatacttatctaaagaagtcaaaaaatttattcgtgcaagtgcttgcaggaagccagtgcttattagtagtgaccctgcttctatcaacgttattgagacaacacatattctattctaagggagaaagagggaggaagagagggagggagggaggaagaagagggagggagcgaggaaggaagataggagatgggtaggggggtaaagagaaaaggagggagaagggaaggaaggaaagaagagaggaaagaaaggagggaaggaaaaaagggccaaactttctgatctatgaacttctcagttcagctgtcacattatgagaagtaaatcagaatttttttaaggagaagtcattcttagcactacaataattgtaccagtaattgaggaaaccaagacaatcttcacctgaataatagagggtctgagaactgtcagccttttgccattcaaaaacatttatgtccaacctgaaaaaaaagcatcaataaaacctatcccaagcattcaaaatagtcctttccaaatgttatttattttaaagtcaatcagctcttttagaaacagattctggtctggctgaaaactcccacaacaaatttactcatccagtggctaatatttaatgcccaccatgggcagagcacacaaatcttcagataaacaatactgaattgattcagcacagattgttcagatttgaatgaccagggagttgtatttgcacatgcaagaacactaagaatctcccagtcctcaaactagaaacctttcagctacgatgaaaaaaaaaaaggggtcttcatttttccaagagggggtggaggtggggatcactttttagctaaaagctatctctcacttcaaaattcttgtctttttctttgtggacaaacaccagtagtctatcacttggagatcttttaatatctcccatcatttaaaacatccacgagagtttgaagatttgtgttgattgccagatacagaagccccttgaaaataaggaaagggtggaggaagcatttttgtgtcctatccctacttatcgtagcagctctatagacaaaagggacacttactggtgagcctctggcccttaaaagaaaatcatctaagaatatgaaggcaatttgatttccccccacagccctcagctgccttcctcacagaaggaagttcccaaaattgctggtacacagtttgcaatcaaatatcagatatgagaaaacctgtagtgaagagtctgggttcttggttttctcataaatccaatataaatttgtaggttggttcagggtcaaaattgccagtgctttattagacagatgatactgatagacacacagagcccaggtcctggaacaagacaatcctgtagtgccaagatctggtcagttgcgttaaggagctgggtttgattctagagtccaggtttatagagaaaccctggctagattgagcctacccatggggagacgatttcaagacaggatgagatctgggaagaattttgttgtcatctgccagggaaattatcacaggactcattgaatgcaataacatgtgagtaagttcccttttgattctgggaatcagcgattttccctgtggattaagacaaaccaacgccagaaggtctcctgtgcttattttaaccatctgctcccatcgtgaaccctggagcatgcatttcctagaagtggtttcatagctcctgtgtgttcatggaaaaggggagtataatgatggggatgctggaagcttttttaatgttttccaaaggaaaggaacccacactgctccccagagttcctttccaatggccctgcagtaagaacggaggacaatgtattgctgggtgcttaaaatcctccctcagtgaagcacaaagagacactttgtaaagaaaaaaagagcaagcataggttctctgtgggaccttgtggagtggtgttttcacgttggtctctttggctcaattgagcataatcagaaagaaatgtgggttattgggaagagacaaaaagcagtggctaaaataccaaagttggcatgtgttcttttttaaaaaaaaaaaaaaatgcatatatttttaaataaaatgtttattttaaaaagaaatgtaaaactttttttttttcgtggctgtgtgatgtacccaggccttatgctatgtactatttatatgtgttatttccttttattcccacaatgggcccatgaagtagtaccattattatcctcatttttgcaaataaagaaaccaggcttagaggatacgtaaattgcctaaagttacacaactgagaaatggcagagccaagagtcagactgtgatttgcctgcctccaaagcccggatcttaagcactgcacaaactgtctgaactgatacttactatggatcatactaatacaatcagaactttcgcaaaacagattctcaagctatgtatatgcccattaagatacatacatacatatacaacttagcgaattcaatgttttcatcagtttagtaactgagcaagttgaataataatgtaggataaactgggtatcaagaggcctatatgtatagacttcctgaataagacctagtttttaatctactttttcctcttaaatttattcctgcctattattttgtcattggtgaacctattaaccacataggggaaatatcagactgtgaaaagagccctggaatggacaaatgtcccaagccctggtttagctaagaactgatctttctccctaccacagctctctctgcccctgcgtcagccttactttctggtgggctctcctatgtagaatcaacaaggccatgggttgccagcagccccacatgtagcaattccagcaacaagagagtttctcagtcctgagaatcctagcagaaatctcagagcttgctctcagtggtcccagcaggtcatggtcatccctgaatccgtatctatggccatgagaagcggatataaatacatgcacaggagctggataccctgctcggccctgagctatggagtgggatcatttgaatctcatggactggcagtagggaaggtgagtttttctaagggaaagttggggtgctagtaccaaagggtgctgaaaaagcagaaatagtagatttctatgacataattcctactttcaggaagttgccatctagcgaggagacaagaaaatagggaataatgcgtagtctgataatcgcatgctatgtgctaccagaagggcatttaataaagtcttggtgggtggaggtggaggaaggatggatggccaggaagaactctccagaggaggaaggcactatgccaagacattaaatgacacaggagttaggcaggcaaactgctaaggaaaggagcattccagactgaggaaatagcctgtgcaaaggcctgaagatttaagagaattgacagtattcaggggatgtagatggtagaacaaggaggcaggggtgccgctggcagaagtgtaggaaagaaaagagggccagggctgtttgaagaaagtaccacagtggccgggcgtggcggctcccgcctgtaatcccagcactttgggaggccgaggcaggcggatcgtgaggtcaggagttcgagaccagcctggccaacatggtgaaaccctgtctctaccaaaaacacaaaatttagcccggcgtgatggtgtgctcgggaggctgaggcaggagaattgcttgaacccaggaggcagaggttgcagtgagccaagatcgtgccactgcactccagcctaggtgaaacagcgaaactccgtttcaaaaaaaaaaaaaaaaagaactacaaacagggtggcctcacagttctggaggccagatgctgggaatcaagctgtcagtgaggttggttccctctgagactgtgagggaaggagctgctcccgttctctctccttggcttacggatggccatgttcatgtccacatggcattctccctgtatctccgcatcattttctctctgtatgtgtctatctctgtgtccaaatttctcatttttataaggattccagctgtctaggattagagtccatcctaatgacttcattttatttatttatttatttatttatttatttatttatttgagacagagtttcactcttgttgtctaggctggagtgcaatggcacaatctcagctcactgcaacctctgcctcccaggttcaagaaattctcctgcctcagcctcccaagtagctgggattacaggtgcctgccaccatatccagctaattttgtatttttagtagagatggggtttctccatattggtcaggctggtcttgaactcatgacctcaggtgatccacccgcctcggcctcccagagtactgggattacaggcgtgagccaccgtgcccagcctaatgacctcattttaacttgattacctccgtaaaggcccagctccaagtaagctcacattctgaggtgctgagggttaggacttcaatgtaggaattttgagggaacacaattcaacccataatagggggcaagatgggggccagaccatgaagggactcataagacacattgaggagtctagacttgttttgaagacagcggggcatcactggagagttttaagcaagacagtgctgtcataaccctttcaccttagaaagatgattccagctacagggtggattggagtgtcaaggacacgggaagggcagcatagtacatttgtgtgaattcatctgataaattgctgtaccctccttattctacagacatgagaaatgatgagtaacccgacatatcgaatttaggacataaagaatgatggggtggccaagtggggtggctcatgcctgtaatcccagcactttgggaggtcgaggcggggggatcacctgaggtcatgagttcgagaccagcctggccaacatggtgaactctcatctctactaaaaatgcaaaaattagccgggcttggtggcacatgcctgtagtcccagctacatgggaggctgaggtaggagaatctcttgaacctgggaagcagaggttgcagtgagccaagatcacgccactgcactccagcctgggtgacagagcaagactcagtctcaaaaaaagaatgatggggtttgggaggcaggcaaaagtaaaggtagcaacttagctcatggcaataacccagccaaagggcagatggtggtggaaatggagagacaaaggtaggtttgaaacatgttaatagaatggaaaatacgggacttgatcattggatgtggatggtaaaggagagagaggttctggatttggaggaggaagagctcaattttgagtgtatgttagtgccattcacagaagtaaagaccaggatgaggaagagttacttgataggaaaaataatgaatttgatttttgatcagttggtgtctgagggacactcaagccaaaagtcttcactagagaggtctggagctcagagtgccttcaatggagatatagatatgaaaggggtcagcattcagatgttaactgaaatcatgagaatagctatgacctatacagtatgtggagtgagaataaaagaggatcctgaggaatgccaacatttaaggtatcggcaaaggagaatgagagggagtggctagaaaaccaggaggggctggtattcccagcactaaggctggagaaaattccagaaaagaggggggtctttaattccttctaatgctactgtgttccactaagataaggaatgaaaagtgttcatttgatttaataataagaaggtggtttataatcaaggtgagagcaatttggatgtagtggcgaggccaggtgggtacaaactgaggaattaaaaggagatcagtaagtggagacagtgaatccaggtgtttctctcaagaagtgtggcaatgtaagaagaagacacacaagaccatagcagacagtcagacatttaaaggactgattttcaagaggagagagatatgagctgatttcaaagctaatgagaattaggtagtataagatagagaaaagggggcagataatgagatccaggttaggttgcctttgggacgttgaggcaggagagaaagaggagggtgggtggagatgcaggtctgtgtgcaggtcatacaggtgtggtgggaggacaatgaggaaattttcaggggatggcttccatctgatacttgaaacaagatggagagataatactcacctatggggcagaagatgaatgaagtgggagttttaataaaaatggataatgtctgaattaagagctgtggagaatgggagagagaactgattgggagacatagaaggatacctgggaagagttggaaaacttgactggagatcatgccttctgcacaatggtaggacttttcatcaacagcatcaaccacccaaaagtggaagcagagaaggcagagaggcaggttgagccaagttgagggtgctttagaaatgggtatgaaagcaagaaaacagaaacaggggctcaggatatgactatagaggaagtaaaatagtgaactacggaatatgcaaagtattatgctaaaagtgaagataggagtcagaaagtggtacaatcaaaaattagaagtggactaagtattgatgcaaaactactaatcatgtaattatattgccatcattgtgatcataatgtaaatgggtacccatgttcacagtttagtaggaatgataaggactgaaaagtgttcattttatttaataacaagaagattgcaggtaacaattgcctgacctcaggtgattctcctcagcctcccaaagtgaaaccctgtctctactaaaaatacaaaaaattagccgggtgcagtggtgcacacctgtaatcccagccactcgggaggctgaggcaggagaatcgcttgcacctgggaggcggaggttgcagtgagccgagatcgtgacactgtactccagcctggcaacagagagagactccatctcaaaaaaaaaaaaaaaaaaaggtataaaaacaacagatgctggtgaggctgcagagaaaagggaacacatacagtgttggtgggaatgtacattagttcagccactgtgggaaacagtttggatatttctcaaaggacttaagatagaactaccactcgatccagcaatcccattactgggtatatatccaaagcaaaaaaaattgttctatcagaatgacatgaacttgtatgttcatcgcagcatgaacagtagcaaagacatgaaatcagccttggtgcccatcaacaatggattggataaagcaagtgtggtacatatgtaccatggaatactacacagccataaaaaagaatgaaatcatgtcctttgcagcaacatggatgcagctggaggccattatcctaagtgaattaaggcagaaacagaaaaccagatactgcacgttctcacttataagtgggagctaaacattgggtactcacagctataaatatgacaacagtagacaatggggactatgaaaagggtgagggagggagcttttcaaggcttgaaaaactgcctattgggtattatgctcagtacctgggtgatgggatcaatcgtacccaaaacctcagcattacacaatatacttatgtagcaaacctgcacatatattccttgaacctaaaataaaagatgaaagtacagaaaacataaaaagccacgaaggagtcaaaagtactcccactagaggaattcacatgtgtgaggacttacaggcaaaataaataagttgcattgcaaaaagctgggtgaatttcagaacagttggaacagaggacagtcgcacagctagggtggagggaggggaagaccgggaagaactgctggaatatccagacagaaggccagagtgatggccacaaaagtggaggaagctggctgggcatggtggctcatgcctgtaatcacaacactttgggaggctgaggcgggtggatcacctgaggttgggagttcaagaccagcctgaccaacatgtagaaaccccatctcgactaaaaatacaaaattagccaggcgtggtgctgtatacctgtaatcccagctactggggaggctgaggcaggagaatcgcttgaacccaggaggcggaggttgcagtgagccgagattgcgctattgtactccagcctgggcaacaacagcgaaattctgtctcaaaaaaaaaagggtgggggggaggggaggaagctgggcagatccagcaaatattcataagtattagtagaaataaaaggacttagaaattgatggaatagaaaaggtgggatgagaagagaggagagaaagggaagattcaagagtaattcttgtctatctttacttctgtagccctgcctttaccacagtgccttcccaactgtgaatactcaatcaagattaaacagaatacataacattctcttaaaattattcttctggcctctacatctgcgtgttgtcacctgagattctgatgatcaaccaacagataactccccttgctcctctacttcctaggtatttttaatttttgcacctggcacccaccctacctctaccgtcaaaaccccaaagagaagaaatatatctaaggttaacatgcaagcaatgcatggactgttacaatggaaagggctctgctaggtccaggcaggcaggcagagagacagacctgacctagcttggaggtttgctccactgcaatagggggttttctgggaacccaagcatcttggagaggtgcaaatgagttgcttatcatctagagtggcatggaagctgtagaattttctcctagcagttataagaagtaggcattggagttaggtggaagagagataggctcatgaaaaaaccttgtggtctgtaatgagggtatattcaacagtgacctaaactgacatccagaaattggatgcatacaggcttctgagcagatgatggcaaataagaataataacccagggctgaagctcaacaacctctcctccaccctccagtcatggtactacatatggcacaccctcttcccctgagaaaaacgagtgccaacacaggaaaaaggagataacttcaatgcctaaaattgtttctgctactccatagagtgagtctgaaaatgcaaagtctggtcatggaaaatacacctgagtttgtgaattggaatccgaagctactacccttttctcattcctaatgttgcatatctatgttttctctcttggactcgtcatatatttcttttattgttttatcataacagtaatttttatatttattaatcaatttttgtttttatccttattcttctactacctttatgaatgtattcatccatgttgcttaatattgattttcttttcttcttttttttttgagatggagtttggctcttgttgcccaggctagagtgcaatagggctatctgggctcactgcaacctccacctcccgggttcaagcaattctccagcctcagcctcccgagtagctgggattacggtcatgcgccaccatgcccagctaatttttgtatttttagtaaagacggggtttctccatgttggtcaggctggtctcaaactcctgacttcaagtgatccacctgcctcggcctcccaaagtactgggattacaggcatgaaccaccaccaccagctgttattgattttctatttttcctcattttgggctttttgagataaaagcataatttgtttctttctttctgataacattaaaaatatttatctatgaatttcttttgagtgcagttttgaggtgaaactatgggtgtttatgcaatatttacatagtagtatgtttctatatattctgtaattacattcttgatttcctttttgatctaagagataacttagaagtctgccttataatttccaagtgtttaagcttctgttaatttatatataaacattaatttttaaaatatgatacagagaagtgccctatcataagtgtagagcttgataaatttttataaaatgagtattctcaatataaccaccacttaaatcaagaaattggacatttctgttagcagaactgtagaagtcctccgtgtgccacctccccagtactacagcactgtttcccagctcccccaagataaattccatactgacttctattaccattgattcactttgcttgtttttaaacttgatgtaagtgaaatcatacagtatatactgttctggatctggtgtttttgctcagcttccattgtgagattcatccatattttcatccactgttaggtgaagcatgaataccttcctttttctttccatgtatacaccacctttgtatgattatgaattcatacaattcattgtattgtatgaatacaccacctttttatttatccactgtgttgtcaatggggacttcaagtggttccaatttttgactattacaaatgttgccaatacaaacattctagtgcgtgccttttgtggtaaatacgtccacatttctgttgaacaagtgaaattgctgggtcatgaagtgtacatactgcttagccttagtgcatactgcaaacacagctctctaaagtactgtactggtttccctcccaccaaaatgcattatatgacagtcccactggctctgcatcctcaccaacactggtttagccagtctcttttcattttagctcttccacgggtgtgtggtggtatttcattgtcatatcaatggcatatattggatgattaacaaggttgagcatcttttcgtgctcttgggccatttgggtagtctctgtagtaaagtgactattcaaatctcttgatctcttgtcagtttctcctgaaggtttcttcctttttcccattgatttgtaggattcttttctttctttctttctttttgagatggggtcttgctctgtcacccgggctggagtgcagtggtgcaatcttggctcactgcaacctccatctccagggttcaagcgattctcctgcctcaacccccagagtagatgggattacaggcgcccagcaccatgcccagctaaatttttttttatttttagtagagacgggggttttaccacgttggccaggctggtcttgaactcctgacctcaggcgatccacccgcctcagcctcccaaagggctgggattacaggcatgagccaccgctcccagccccggagtctatatgtgtatatacacacacacacacatgcacacgcatacacacacacacaaatacacgcacacatgtatacacgtatatatacacacacacatctatctatctatctatctatctatctatctatctatctatctatcatctatctatcatctatctatcatctatcatctatcatctatttttctttgagacagggtctcatactgttgctctgttgcccaggttggagtgcagtggcctgatctcggcttactgcagctttgactccctgggctcaggtgattctcctacctcagcctcccgggtagctgggactacaggcaagcgccaccaggcttggctaatttttgtttttttttcagtagagatgttgcctgggctggtcttgaactcctgggctcaagtgatctgcccgcctcggcttcccaaagtgccgagattacaggcatgagccaccatacccatccggattatttatatactttggagttgagttctctctctccctgttttatgaaggttgaatgtattgcaaataattcgtctcactgtgatgatttctttttcattctgttttttattttttgagacagggcctcactctgttgccaaggctgaagttcagtggcgcaatcttggctcaattcagcctccaccatcccaggctcaagtgatcctcccatctcagccttcagagtagctgagactacaggcactgccaccaggtctggctaattattgattttttttttttttttttttttgtagaaatggagtttcggagttgcccaggctagtctcgaactctggagctcaagtgatcctcccgcctcagcctttcaaagtgctgggataacaggcgtgtaccatggggcttggcctttttcattctcttaatggtgtcatcagatgaaccattaagaaccaaagttcttaattgttaagtagtccaatttgccaatatttcctttaagattagaatatttgttgtcatgtttaagaaatcattgtctaccacaagatcatgaagaaatttttctcctgttttttattttgatttttatttcttttgaaaaacaataatttttgaggttttttttccagaaaaaaatgggtagttgataaaccttttcagtcattacatgtctcaaagtgacttccttttgccctcgtttgtgaatgttaggccagatgtagacttttgagttgcatttgagttatgacctattttcatgggtgccctgtaatcttgttccaaattttattggcattgagcattgcagatgtgaagcatgaggcaaaccagcttctctttttggagaaaaacttctttttttctggtgtgtgtgtgtgtgtgtctgtcttcgaaattcagaaatttaatcaagatatgtctagggattttgtttttcctgtgcagtaatattttctagcacttagtgaattattttaattttgacttgggcctttcttcagctctgcaaaatgtttttttgtttatttgtttgtttgtttgtttctttgagatggagtttcgctcttattgcccaggctgtagtgcaaaagcgcgatctcggctcaccacaacctctgcctcccaagtggctgggattacaggcatgtgccaccacacctggctaattttgtatttttagtagagacgggggtttctccaagttggtcaggctggtctcgaactcctaacctcaggtgatctgcccaccttggcctcccaaagtgctggaattacaggcatgagccaccgcccggccttttttagtattttttatgcttatttcttcttcatcatctgctctgcaaattctattacatatttgtttgaatgttttgaaaaaagataccgtgtctatttttcctttcctcaccatttcattgcattacatactttttccctctgaattttgggatcattcttccagcccatcttctaatgcagtaattccattttgggcagtgccagatctgctatttcctgcctctatggagtttcattagtttggaagtcatgtgtttcttatccaagaactcttttttgtttaatgtggctcttcttcatggcaaccagctcttgttatattaaagcagcgttctctcagttctcactaagaatacaaattagagtgaaaaaatatatttcccttacttcttgcataactttcactagaagctattttctctggattctcagattagtctccctgttttatggaggtaatagcctataataaaggcacaggcatttgaactagaaaaacccaggtttgaatcctagttctgacacttgaatggcagttcacctaaaccctctgagcttggtttatttgataggtatagtcaaaccctcatcgaagagttcttctaaggattaaataagataatgtatctcatagcacttacagtagtacttggctatatagtttattattattaccttcttccttctcatcactattacattgaaatgctgtcttttttctgcttgtcagtctcacatagagaggtctggttagtttagacttggtagctgagttggacagaaaggcgtcaggtcagaaatgatgcagatcttactttaatttgccccaaaagttactacacgtagtaaatctacctggccacgactccctcactcagaaatcacctgtaccattttttgacaagattgtgaatgggacctttctcaaatttccatgagtgacacagaattgctctattatgtttgctgagttatttcgaatggatattggagggagaaatgggtcaaaactactggcttttgttaacattttgttaccagaagttgaatgtaaagtttactaagaataaagaaagttaacacataaatgttttaggtaaaaatatagtaaatatttctatcctttggggataagggagactttctaagcattaaaccaaaggcataaaacataaaggaaaagattgatggatctgaccacattaaaaatgtagaattttggctgggcatggtggctcatgcctgtaatcccagcactttgggaggccgaggtgggtggatcacctgaggtcaggagttcgagagcagcctgaccaacatgctgaaaccttgtctctactaaaaatacaaaattagccaggtgtcgtggctcatgcctgtaatcccaactacttgggaggctgaggcaggagaatcgcttgagcccgggagatggaggttgcagtgagccgaaattgtactattgcactccaacctgggcaacaagggtgaaactccatctcagaaaaaaaaaaaaagtagaattcctggaagataaaaatcagcattacagatgttgaaaaggaaaggccaaactagagaaaacatttgccacaagatacaatagcattagtataattaatatgactaaaaagcttttatttcttttttttttttttgagatggagtctcgctctgttgcccaggttggagttcagtggcgcaatcttggctcactgcaatctctgcctcctgggttcacgccattctcctgactcagcctcctgagtagctgggactacaggcgcccgccaccacgcctggctaatttttttgtatttttagtagagacggggtttcaccgtgttagccaggatggtctcagtctcctgacctcatgatctgcctgcctcagcctcccaaagtgctgggattacaggcgtgagccattgcacccggctgacgaaaaaccttttaaaaattgataagaaaatgtagacctataacagaaaaatgggctaaggacatgaagaattaattaaccaaagaagaaatactaatggccatgaaacatgcgggaaaatgtttaatgtggtaaaaagaaatgcaaattgaaacagcataataatgctatttctcatctattcatctggcaggattattaagagtggtaatactcagcataggttagggtatggagaaaatggcatatttacacgctgtagttgggactgcaaaaatttccattatttatctacaggataatttggcaatacatataaaaagctttaaaacatgccacatttcaatgcagaaattttaattatttgattttgatcttaagtaaatatatgcaataagttttaaccattaacatgttgatcacagagatatttagaataacagaagataagaaagaagatattgtcctaacaacagtctgatcctgtttttgaaacatgtttataaattcccagtgttatcttgattagtaagaatatgggcatttttcactttttaaatggatctgagttttccaatttttttcctcaataacattaaaatgtgtaacatgtttatatataaacacatatactgttggactttatttactaacattttattaataatttttatatctattctttttttttttttcccgagacagagtctcgctttgttgctaggctggagtgcagtggtgcaatctcggctcactgcaacttctgcctcccgggttccagcaattctcctgcctcagcctcccaagtagctggaaatacaggcatgtgccaccacacccggctaattgtgtactttattagtagagatggggtttctccatgttgggcaggctggtctcgaactcctgacctcaggtgatccacccgccttggcatcccaaagtgctgggattacaggtgtgagccaccacggctggcctgtatctattcttgtagtcgatattggtttgttgttttggtgtctgtgccatcttcatcaggtttgataacagagttaaggcaatttcataaagtgaatttggatgctttcattttgtttctgtgctctgaaacactttaaatagcagaagaattatctgttctttgaagctttgaaagtgctccccataaaaccatatggacctggctactttggggagtgtcgttccttgaaaagttttccaagtttttccctgatcctggtcccctcatgcttcctacctatttttgaaaaacctgtagcaggctgggcacggtggctcatgcctgtaatctcagcactttgggaggcagaggtgggcggatcacctgaggtcaggagtttgaaaagagcctggccaacatggtgaaactccatctttactaaaaatacaaaagttacctgagcgtggtggtaggcgcctgtaattccagctactcagggaggctgaggcacgagaatagcttgaacccaggaggtggaggttgcagtgagccgagattgcgccactgcactccagcctgggagacagagcaagactccatctcaaaaaacaaacaaaacaaaaaacaaaaaaaaaaaaaagaaaaagaagagaaacacttgtagcagttcatattctccaagcaaattaagagcttcctttaaaataagtaaacataaggttgcaaaagtattcttacacttttttttgcttctgtgattaaatcctttttcttgtttctaaagttgtgtgtttttcttctttttgcctttctatctattcattttatctatctctttgaaacacccagtcctgaaattaatggatcaattacacccttaatttattctaaggtctgcattgggtctgctgtacaagtgttcctctggaacccaggagagaagacaagcaactatcgggggaaagttttttcttatggcagtggtaaatgtgccagaagaccagaggaaaatgtacaaagcctcttaatgcacagcttggaagtggcatacatcacttccacccacaggccgttagccaaagaagtctcttggtcaagtcctaagttattaagtgggaaaatacactctgcctatgatgagacgatgcaaaggtatattaagggaaggctgaaaattggagttaatggcatctattaataccatgcccaaagatgggaacatctatcatcctatttaaaaaatattttggactaacagatatactttaatggtgcaagtcaagtttgatacctgcaagtataaaggtgattggaatctgtaatatccttcagttgtattgtagcactgaatgttgttttgacatatcaaatactgtaaggcataggtgtatcttctccaacagcaatttattgagcaaatagactggccagttaattccccaaaacatattacttagagattttttactataaacccccatatagtagataagaaaagagtgtcctggagaagtccagcaagatgattggccataattataatgagctcgagcttcctgttctgctttctctcttctgtggaccctacacagtcatatgatgtataggatgtttcagtcaacaaagaaccgcatatacaacagtggtcccataaggttataacactgtatttttactgtactttttctatgtttagatgtgttcagataacacaaacccttaccattgtgttacaattgcctacactattcagtacagtgacatgctatacaggtttgtagcctaggagcagtaggctataccctataacctaggcatgcagtaggctatacaatctaggtctgtgtaagtactttctttttttttttgaaacggagtctcgctctgtcacctaggctggagtgcagtggcacgatctcggctcactgcaaactccgcctcctgggttcaagtgattctcctacctcagcctcccgagtagctgggattacagatgcccaccaccacacctagctaaattttgtatttctagtagagacgggttttcaccacattggccaggctggtttcgaactcctggcctcaggtgatccacctgccttggcctcccaaagtgctggaattacaggcgtgagccaccacgcctggctgtgtaagtactttctatgatgtttttgcaacaacaaaatcacctaataatgtatttctcagaacatatccctgtcattaagtgacacatgaggttattctgaattctgttctgtagaccagccctgtccaatggagctttctatgatgatgaaaatgttattttacattctctactacggcagccactagccacatgtagttattgggcacttgaaatgaaaaactgaaatttttgttttatttaacctaatttaaaataatatttaagtaaccacatgtagctaatgattcccatgttggccaggtggctctagtgaatgcttgctctcagagtagaggttaaaaccattctaattcaggggattctaaatggagtatcagatttctaagggaacatatctcagacaaatagtactacaatgttgctgaagcaagtaagaagcccatatattgttgaccaaagcaagtgacaaggtcaaagtcaaggtcaacaggagcagggaagtgtaatcttcccataggtcaaagctaggtatataagacatagaaatttctttcttcttttctcctcttctttccccttcccaccgtccttcctcacctcctcctcttcttttgcaaatacatttaaattttatattaagtctattcttctaggtggcaaaaattaagttttaggcaattccatctccatcttggccaatgctgcctcctcctcctgatcatcatctttgatctcaatagctttcacatccagctgtttcaggtacatttgtgtatcctcacagcacacatgcagacaccaaatcatcgcacatggcttgggtgcagggagctctggggctgccactagcctgtggtatgggtacctgaggcacttcatatagatgtcttactggtcctctgtcttagaaggcagaggatctccacaagcttggccatgcctagccttcactccaggagtggtgtacagcttctccactgtgctcagatgccccaaaacgatatgatatatctgtcttcagtctgcctgcccccaacctaattgttgaccatgggtaaaagcaaggtgcatgctactttctcagagaaacccactgtagcagtcagcttagactcaattatgttacagcaacaaacctctgatttaaaacagcaaagataccttttgctggggggccacatcactgttccacagcatcccctaactggttcattggcagcgttaagaagaagagggcaggatcacaaaatgactcctgaaacttctgccctcagaagaagcgtaaaagtcacctctgtgcatattcattgttcaaagaaaatcacatgaccgatctttacctcaacagtaaggtaaaatagagtccttcccatagggattggcagtgaaattttttgggcattaatagtatctgcacaagcatcatctacttttcttctctctttctctcccgctttccagtccccatcaccatcttcaacatctcacagcctgtaggttctttatttagactaagcaggatgatatatgctttataatctactatttctgacatagactattaaagctccaaagcctgtattctggaaactcaaaactcttttcttgaagaactctattctgtcacatgtgtttctgaagctcttgtttctgcactattatcccttccccggggtagaaagcagaaaatgtactagctgcttcctgagtgaaggaagcattcaaaggaagacagaaaatctgtggagaagccaccagttaataaaacattattggaccacactctggcaggggaggctgccaaagggatttccctttggaacggaaaaatcttgggattgaaggcaggggctggcatgatattggagttggctaccagagttcttgaggattagtgctaacaagtagaactttctgagaggatagtaatgttctttatctgtgctgtccagtacagtagcctttagccacatgtggctcttaagtacttcgaatgtgacttgggtgaccgaggaactaaattctgtttttattttattttattttttattaaactttaagttctgggatatgtgtgcagaacgtgcaggtttgttacataggtatacacgtgccatggtggtttgctgcacccattaacccatcatctatattaggtatttctcctaatgctatccctccccttgcccctacccgcgacaggccccggtgtgtgatgttcccctccctgtgtccatgttttctctttgttcaacccccacttatgagtgagaacatgcggtgtttggttttctgttcctgtgttagtttgctgagaatgatggtttacagcttcatccatgtccctgcaaaggacatgaactcatcctttttaatggctgtatccatgtccctgcaaaggacatgaactcacccttttttatggctgcatggtattccatggtgaaaatgtgccacatttttttttatccagtctatcattgatgggcattaggattgtttccaagtctttgctattgtgaacagtgccacaataaacatacatgtgcatgtgtctttatagcagaatgatttataatcctttgggtatatacccagtaatgggattgctgggtcaaatggtatttctagttctagatccttgaagaattgccacactgttttccacaatggttgaagtaatttacaatcccaccaacagtgcaaaagtgaggaaccaaattttgaactttaattaacttaaattgcaacaaccacatgtggctaggggatactatattcaacagtgcagttctggaagttaccagagatagtgttgctaaaagtcatacagtgaccttaatgtcttaccgtttatacacataaaaagcatgttgtactttgctttttaaaaaatctcaaaatggaaataatttcacttaatatagacatcatattgacattataggtacagcatagttggttaaaagcaaataatgccttcatttattcactggctggagttgtctgacctaataagcagaggctaaattcacaattaattaaagatttcatgttcattcagccaagacatgcctcaaaccactttttgttcagctagccagcaagatacttagagccatatttaggacatcttgcaactataatcaacatatgcaaaatatcctatttcaaagaagatccttcctttataagattagtaattctgttgtatgaacaggatttttctctattatgctaaatataatcattttgtagtaaatgaatacggcaatgtactatatgaaaatttatatgtaatttgattattgtaatttaacaaatagttctcttactgaagatcaggcagcatatttttctatttagggatgaggaaacagaggtttggagaggttaagctgttttcctaaggttatataacaggtatgtggaattctgatgcaggaactcctatctgtttaatccaaagtgcctcacacccaacaatactgcttttacttgatatataatgataaaaccttgatatataatgataaaacctaactgcaatcaccaatctttttcttttttttcttttcttttttttttgttttttgagatggagtctagctctgtcacccaggctggcgtgcaatggcgcgatctccactcactgcaacctccacctcccaggttcaagctattctcctgcctcagcctcccaagtagctgggattacaggtgcccgccaccacgcccagctaatttttgtatttttagcagagacagggtttcactgtgttggccaggctggtgtcgaactcctgacctcgtgatccaccctccttggcctcccaaactgttgggattacaagcgtgagccaccgcgcccggctcacctatctttttctaaggatagagaccaaagaagccacaaccccttccaaggagtcaactgacgccaatgggatgctgtggtgcaggacacttggggggtgctgcagctgatgccccttggtctcctggtggtggaagggaaatgggactagatacgagattggcatctaagccatacaaaaaagctgtctcagacaggttgggccagtaagcacaacgtcacttatctatattggcttctggttacctaatgggtttggtttggtaaaaattaagaatcagacttctgggatgcaagctatgcctgttcaaaatctgctgtcagcccctgtgtttcaagcttaaccttgaacctcatcattaatcaggtgaccttagaccgttttatcagccacgtatctgctagcataaatctcccttctgtgaattcagaacactgatacctcacattcactaaaaatacaatgagagacagatgctcactttctttatttgctgttgtattcttggtcccactttgccatttttaaaacaggaaaacgtttcccttactcgaacgctaaagtgcaaagctgctggtgacgctgccttctcccacctccgcactccactgtccttgcaaactttggacagaggaaaggtgggcacggggcgcgaaactacaagtcccggcatgcacggcgttctccgcacaggcgcacggggaccgccgggccagccggccagccagcctgcggagactcccgggtccccgcgccggactgggactgggagcaggcagcccgggcggagcgggccggtgccgaggacggccccaggcattgctctgccccgggcattgcgcggcgcgcgtgagggggatgcggcaggaggcggcgcggcgggaggagtaggcggcggcgccctcgggagggagctgcgcgcgggccagacggcgcccggaggctccgcagtgccgccgccgtcgcccgggaggctccgcgcgggagccatgtaaccctgcggcgggctccgggctgctccgtccttccccagctcccgggctagcgcggcagcggggccacgatgaagaagcagttcaatcgcatgcgccagctggccaaccagacggtgggcaggtaggtcacccgcgggcaccgctgtcggtgcgcgcccgcgaggctgcatccgcaggggcgcgcaggtgatggagcccgcccagcctccagtcctccttgcctcagtcctttcccctgcaccagctccctccaggcgccgctcgcaggcgcgacccctcctccctaacttcccagaccccggagctcttctcactcgccgccttctgctccgggctccggttgccaagcgcaaagtgtgacgcatcctttacctgcgtccccggctgccccttcgcttcgtcctccctgcctttccccgggactcccttctccctctggccgcctgtcttcctggaaacaggtgtttgctctgattgtgctggaggcagccgaaccgcagtcggtctccggagatctcttccctcccctcccctgcgccgagttcagggctgctcccgggtccagggaaagtgctgggcctggtcggcctgcccctcccgccgtgtttgttttcagggactatgactgtacgagattctggatcactttcctggccgggtttcttaaggcgtttggtggggggaaagggtgaggggtgggagaggaaggaaggtgctggtggaatggcgttgctgcctgcttgatgttaggactgatttcagtggagggagggaggctgcaaaaaggaggcccaagtcctcgggaagatgagataagcagagaatcgcagccaggtaggggagggggacagaggccccacagtcagaagagtcaggccccgggaagctgcaagaccccgcctgctgccatcacggtgaaaatgggctacatctggactccaggagcggctctgcagggtgccaacatctattaaggttacataaaaatcctggtgggtcgctcccaagactagacattctttgaacacaggagcgttaggtagaagggatttttcctggaacccctactcctggggagggatttccgttgctgctgtggcaaaggaattcaggtgtgctgttctaaagcaatcagaaagcaaagaatccagccttgggtgcagttcaaatgcaagctcaacacctcgagggctctccactaggtttacggagaaaccgaatacctttcttgggtgggaagtggagcctgaactggcatctggtaggatgggggtggggacatccctggggaataggggacatctgaactcccgtctgagcatactgccctagttacagtgggcatttgagggcaggggatgcggtggcttcttatgcttccagggactccagatggtttccaagtaacaatgtctaaaattgacttggattcatttttccttcccaaacacatgtgctttaacatgagggggaatttatgaatagcagagtcagattagcccagatttctggcatggtattgccacagatatagcctcacgtggactgccttttgatgtgttggatgccgagatagtgtttcctggtattcgttgtttagcagatgacagtcaagccgacccgtctttaatgtcttggcttcttcgtcaccctgcaggcgggcattggccatcacctcagaccagccaagtgaccaggaggcccctgacactagacttgggttgctggtttctcttggtcttggggtttcagtgccgtgctagaatctaaatgttcagaacatgtttatgcctcctccctggccttcctgaaacacaattcttctttttttcaggacctgtttttaaatgggggagatttttgcgccatggcatcatatcttatttttcagcctcatccatggggggaatgcaaaatggtgaggggaggttggatttcagaaaaagtggtcttaggtattgagagcacgttcttggaagtccaagcagctggttaccaagaggttctttcctcttctttgttggggctctggtggatgttggcctatggatgaattctgcctttctccgttggtagccattgtgttgtgcactgggccaggtgagggccagcctgtatcgcttttgatgaaatccagagcaagccttttaaagcaaaaaccagttcatgttaccttgctgctgaaaagcttccagcgacatctgattgtgcttagcatctcatatcttgccagggttctacaggaccatccttggttggccttttttcttaactctttttctccccattctcatctcttcacattcatggagctctagccgtgtggcctttcttgccccaaacacactgagctcatatccaccttgaggatttcgtttttactgttttcccattttttttgttttttgcttggctgagaatgtgctccttccaagtagctttttctcatcatttcagtcttggttccaaggccttcaagaggcccttcctcccctatttacctccagctcatcattttttcatttctggacagcactcatcactgattgaaacgcttttattttttattttcttgtctgtctgcttccagcagaatctattgattgctgttgtatgcctgtgtagatagtgcaatgccgtttagactactgactctcaatcggtgttgattgccgagattaaaacggtttaccccagggtccgtgagggtcagcgagaggggcagtatctcctctattattgagaatgttttgggtcatgatcctatgagtattggagtaaaagagcccgcggttgcctgttaatttcttaaatcagtagaagcacataggattggaatttggactttaggtgtgcagttataaagcacttgatttttatccttatatttttctaaagttttcctctttccgagggaggactaagaggacttgaaagtccttcctcatggctcgccttccctaagttgcaggttctggagttctgaatataaaacttaaagtcattttaacaatgtaggagttgccctacttaaacatactctgctgggttactagtactttctctcgaagtgctcacatccaagtcatattaagggcgtcagcgactatgaaaagatttgataaaacccattgtatttaactgacaaaagtttcagcccctccttggtctgtttccttagtctgcacgtgttccttctgctttgaactttcccctttctgtcccttcacttcaatccgtcctttgggaagcactccctggccactgtgtgcctcatggttaggagcacaggctttccactgggacaggtttagtttgttgctgactatggaatccagagcttaattctctgcacattaattttcttacttgcaaaatgggagtagttaaggattgcactgtggtaatgtggtaaccacagtgataacatagataacctgtgaaaagtacctagcagtgctcagcactaggaaatgcttaataaatggtagctacaagtatctctgggcaaatgttatgactgttattgaattatatgcactatggcatatgtacctttattagatgtctactgtgtcccagacactgctctggttcagggagtattgcagtacagggcaaacaaaattcctgtttgcctggaacctgcattctaggccgggcgtggtggctcacgcctgtagtcccagcactttgggaggccaaggagggtggatcacctgaggtcaggagttcgagaccagcctggccaacatggcgaaaccccgtctctactaaaaatacaaaaattagctgggcatggtggcgggcgcctgtaatcccagctactggggagtctgaggcgggagaatcgcttgaacccgggaggtggaggttgcagtgagccaagcttgcaccactgtactccagcctgggcgacagagtgagactccatctcacacaaaaaaaaaaaaaggaacctgcattctaaaagcatgctatggtaataatggctcacttgtgttataatttttatcttttgtcatttactttccccactagactttaaactctttggaggcagggacagctgccctaacgctgccctgtatagaaggtcctctgtcattctttggcaatggaatgagtaagtgaacaaaagatccatgcgctatagataggggagtcttttgaagtagttcaaagatggggaaagctcctgataccatgtttctttaacgttgtgatggtggtcagaggagagaggaacagctgcacttctgggcattggaagggcagagcaagatttacgggagaatttggttcttgcctgattgatggcagcatttttctttttaccttcaagagagtctagcagttgctggagtgagaagcataccgaaaggcatagagtatttttcttggaagtgacatttgcttgatgttgggtggagcaaagccctgagctaaaatttggcacccacgagacccactaagataaagcaaatggaagaagtaatggtaccttgatttggtggggaggacttttttttccagtctgcacagtgggttcacagcggccccatcctcagagggctgtcatgaggttggagggagcctggtccactgaagtcctcaacaaatggttgaggtggttcgttgtcactgaacacccattcaagtcttccaaaaataatgttggcctcctaagtagaaaaggattcttagaaacgatttcaacagctactgcccagtgatggtccaagtggggcttgtcctcttgtttaaaatgagtgatgttcaaagtgtctgggagtaggtgaggaactgtgggtgtgcgggaaggagaaggctggttgggtcgggttgaattgtgtggatttagaggctatgagttggggagtgaagacaaagttttgtctctggagccttgttttctattccttgactgctttgcatacattgcaaagcaggcttggtttctggtgcacagctttgcaggtatcattgctgctgtgcagctcttggaattcagctgcagaggcctaggcattagccagtggtggggagcctgggaactggaggctgaggctgcagcagcctctaggagcactggtgctgcagacatttttgtctgggccaaagctgccaaagtcagtgaggatcttttccttgaaggtatctctgagacattgccctgccttgtagtaggccttctaagagccgtgacccaatcaataggacattagaggaaaatcagaaccaattccaaatttggctttggactgctttgttccttcccttctatttcccttactgtgagttagacctgccagaccaacacaggccctgccatgggcttcctgttagcccagcagggctgggcggacccaaactcgtcccccaaagagcgctgtgcacattgaatgggtctcagagcaaagtttttcattagagttttatggaagcccaggccttactgcctgttctgctgtatatatgtgagagataacagagtgtactaacccaccgattactgggttagcaaatctggagagaatattctttgctcttatcttctaagatcctcactgtgtgggtctgctgggtttcaccttctgctgagctgctgtcagcagtcagcctgaagctgtctagatttcctgcagaattctgttatcccagacctgcaagtcatcgtgaggaagccatgctcttaaatagcaattaatcattttccttcccagtttgtctccatcaaagtaatttatcaatgattttttttttttaatgatgggcaataaggaccattttttttttctctagagaaagtggatcagtagccatacaaatatactggtaatttatggtcattccttttagaggggattagtaagtatcccttttattaataatcaaaagcagtttatttcaaatgctatttgataaagacagcaaataataaaattatgctacatctgtgtggatgtagttgtaggtcaggcaggaggttggggggagagtcagagagtcaggcctcttccctcgggcgtggggcatccaattgagctggcacctggaactccaccgcctttgggaagcttgtggctgtctagcaatttcaaactcttctttctgtccaggaagcagatgttttgctttcattttccaactttagagcttatttttagaataaatgtttattttcccacagaattcaatttactttttttaaccttcattttggttatataagtaatatttgtttatggtagaaaaatcataaacttatggatgggctaaaaggaaaaaaaaatcacctataatctcattacccagagaccatagttaatattttggatatagtctttcagtttttgagaagtatatctatctatctatctatctatctatctattctttaaaaagagtacagaccatactctgtatactgttttgtaacctgtttttttttcctttatattacatcttggatatgatcccatgtcaataactgttaatccccagcataatttttgaaggctatacagtattccactgtagttaactcattttcttttgctactcacttagcaaatatttctcatgaatttagcttcttaggatgaagtcttagaaatgtaattgctgggtcaaagaatatgtgaatttttaagactttgaatgtgtatattatacacacatacatacacactactttcactgcagccttgaacttctgtgctcaagcgatcctccatcctcagtctccctaagtgctgggattacaggtgtgcaacaccatacctgaccccacctcttttattttctagtgaggctgaacttttctttgttttttttttttgagatggagtctcactctgtcacccagcctggagtgcggtggcatgatctcggcttactgcaagctctgcctcccggattcatgccattctcctgcctcagcctcccaagtagctgggactacaggcacctgccaccacacctggctaatttttttttttttttgaatttttagtggagacagggtttcaccgtgttagccaggatggtctcggtctcctgacctcgtgatctgcccgcctcagcctcccaaagtgctgggattacaggtgtaagccactgcgcctggccttgaggctgaacatttttaaagttctcttgacattagttgccttttctaaattgcctgcatttgtctttgccccatttttctaaagtcatgttcacaattgttttcttattgatgttaaggtaatttttaatatattaagcatatgtatgctttgtcatatgccacacacatctccctagaggttttaaaaatttttgttgtatgtctcttttttcttttggccgtgtataaatttaacattttgtgatcttaagtctatctatttgtggtttgttcttcagtgttatgtctggggatactttgcccagatgcagattatataaatatgcatgcatttttattactatttataataatttcattttaccttcagatctctagtgtgtcagtcattgattttgatgtatgacatggcttaggtataatacttacgctttttaaaattgattaccctgctattgattagtgtaattcatacccaccatattgaagtatcatcatcattgtgtactaaaaaatttcatctacttttatctttttctgtgatttctagtttgttttttattgtctgttggttctggcaggaatttaagacgggctcagctacccagataagcagtggtgggttaatccttatcatgagaccccgtccattgggtgggagtggagtcaggctgaacttctcagctcagcttcaacccgggccattcctgggtctttagagcacaacagcctttgcctaaggatcatgctgtgtcttaaccacagttaacctccaaattgctccattatgaaagaaagttgatcagttttcttgactgtgctcatttgtttattgtctctcagtattactttttaaaagtgtatattaagatggaaaaaaatgggcatttttacaatattgagtataatgcgaattcttctcatctgggaatagggcatgtttattccaatctatttataatcctataaagtagtttttgtccattttgctcctgtacaattttgcttttacttataggtaatttgtcagtgttgttactgtagcttcagtgatttgaatcttttattaaattatatattttttcttactctttgttgctggaatgtagcgaagttgttgatttttatgtaattatcttaacagccgccttcatgaactatctcattatttttaaatactttttttaaaaaaattgagtctgtgggattttccagggagacaattaggtcttctgcaaataataattttgtattttcctctctggtggtttatacttgttttattttctcacctaattgcattgtctaggacttatagaacaatgttaaaatatcatggcaatatgtgggcattcatgtcttattaacctcaattaaaatgcatgatgattggtttgagatattttgttttttaattatgttacatattgcataattttattttactttgaggttttctttgacatcaaagttaaatttgatttatcatggcatttgcagataatcacaatgtgtttttttctttgattttgacatcactcaataatttattccgtatatatttattggacacttttatgttccaggcatcattgatacatcaatgatagagtcagtacccatgaggagcttgtgttttggatgtttgaacctcaatagattttctaatattgagctctccttgccttcctgcagttaatcttgactatggtgtgttcatatttttcaatactgcttgatttaatttgttatttaggatgttggcattcaacattcataaatgaaagcatttgatttttttcccccatatctgtcatgttttgttaattgtgtaaaatgagttgttcaatgttctttttgttcctatagaatggtaagatggagaagtactcattctttgaagataaaaacaactttccaagggtgttttctggatgtagttctttgacagttttctggatttcttgaatggttattggactattcatgttgtctattttttcttgagtcagtttgaataacatatttgatagaaaagcattcattatactatgattttaaaatttaatagaaagtttttgagtatatcattgtatttctattgtcattcctaatttacaattctgtttttccctttgacaagttttgccccagaggaagtctctccctaccccggtcagtaattagatttaagctattttcatttggatttctttctcattagcttttgatcagcacatatgttttctagtaaattctgcttttctcagatcctttcctcctgatttccctgagtttactttgttcttttcctggtctttagtcttccatgttgtgttaggataggttaagctctgctgtgataacacatgagctctggaatttcaggggcttaacatagcaaaagcttcctttaagctcatgtgaatgtgatgtgagtcaggaggactcccatggacagctctcctccgtgtgtgattctggaacctagtctatccatcttcccctccacctcaaaatctcagtatgtggttttcagtcagtgctaaaggtaaaagagaaaatagaagtggtatactggctcttagatgcctgggcctggaattcacaaacgtcacttatgttcacttttcatgggccagtactagttccctggatatgactggagacagggagcctccacccctgttgaatctccagcagtcttctttctctccgcttccactgctcatgactgtcttttgaatctacagtcttctctgccccgccctaccctccgacgttcaggtatgctcactgcaaactctgcctcccgggttcaagtgattcttctgcctcagcctcctgagtagctgagattacaggcagctgccaccacaccaggctaatttttgtatttttagtaaagacagagttcaccatgttggccaggctggtctggaactcctgacctcaggagatccatctgccttggcctcccaaagtgctaggattacaggtgtgagccaccatgcccggccagagaaaattaattttttgttttgagccctttctacaatagggagaggaataatgaagagaacagaaactatcctactgtactggaatggcacctactttatggggttattgtcaaggttaagtaagatagtaaatatcatatccttagaataacccctggttgtaataagcactcaataaatgacagttattaccaatattccttgccgtgctgaaagtgtctttgacatgaagcatttattttgttatttatattcctcgttacctgaaaattacaacttgaaattgatacccatttgtctccttttcccaaatcaagcccagtttttctgtatttagccaagagcatgcctgaaggcagcaccttgaggtatcagtaattgtaatggcttcactcattgaatccccatggtgactaatagttattgtatcactcaatttaagtctaggttaagcagctgtaacaaaagcccccaagtctcagctgcttatagcactggccagtggagggttggaggcagctcttctgagacccaggctgcagtgggctcggttccacacatggtgcagtgatggcagaggcagtaaatgaggatgtgagaagttatatcctggctctgaatattctggaagtgacgcgtgccacttctactctcaaagtagaaggcaatcctgataccggccaaaagtcatagagccacagaagccacatctgtgtcatctgttgtcaggaactaggctatgtagtttataagcattattttaattcactcattgcaacgtctctgtgaatggggctatttacagccccatttcacagatggggaaatagaggctaaaagcggcagagccagatttgaaccagggcctaagtaggtcagtcgtaggcaaatgcctctcctgcttctctccccctaatcttgttatttctgctgcctcagagtccctcaaagttacttcagtttaggtggttttagaaatgctaattaactgctcctgacttgaataaaaataaaaatgtcacgttcatttaagataattgagtgtcttgtatgtacccttaaccacaaggagcataaagtgaaatttctgccaatagaagattctttcactttgttttttttattgcaatttcagcagaaaaggtaagagaaagttctttgtagctctatgctgagagacagcagtttatctgcaaaagcctctacagactcctatgtaacacattaaccaaacaaggacctgaaaacatagagtctgagaaaggaatatgaaaagtggacagagcttttagcactaggaatctcatgcacactgttgcctttgcagatgtgtgtgcacactggcttggttttcctagatgctgtttaagtgtgtcctctgacggacacttgtgcagtaacggcacagaccttcctgttttatcctcccaacaactcttaagagtaggttctggtgtctcccccattttctacacaagtctcagagcaggtgagtgccttgttgctgctggttgcatagctggtgagggaagtggtttgagatttgcttccagaaatgctggctctgacattgatatttttcatcactgtactttaatgactctgcagtagggaaagaagcataaacaatgaaatgtctaatattaatggaatgattaagtaaattctggtacatttgcacaattgtaactattagtgtttttatgacattcaaaaaatgtctaagggccgagagacatgtttatgatagggaacaggatatatgagtgcatacagggttaagattgtacagtattttaaaaaatgcatagaaaagtctggaaggaaatcaggaaagactagaagattaagcataaaatgttatctctgggcaggattatgagtgatttgatttctgctgcttatgcttttttttaacttccaaatttcttaaaataaacgtgtattttattgaagagagagagaaaaaaaaagcttccagggctcaaagtagacaactgtagtcagaatttcttagaatggtattttattttaactttggggccctaaaaagtctaagtacaaatatgtttccagttgccttgactcctggttttaaatgtgagaaatctcttatctttaatgttctggaagggacgtgatgtcagatctcattttctaggataaactagtctgccattggaaaatgatatgctaatagccttttaggccattgctactaattttaaagacataacattttgagacttggtctgtatgacacatagctgaaatttgctggttcccccataatcagttagggttctctggatgcagcagcagaaatagactctagctaattttagcaaaaaaggagttttgggaagggtggggatggttgaaaaatcaaagggaagagctggacagtgcggcctgggagtgaccacagagtgtccctgctgcagggcaaaggacagtgtcgtcagaggccactggcaaaggagttgcttcaaaattcttttctgtcattgggtcactcaggtgattcacatatgacagtctagttcgttaagtccgatcttcacttggaaacagggggagaataggaattctttcgattgacagtctacaatgacagcagtgaggagaggcagagtgcaaaaggaaaatcagactcttggcccgaggacagggaagggatgatgctgtttaacatacccagttgttgaccaggctctttaatcagtgacatcaaagaccccaccttgatcgatttgccagggttctacttactgatttagtgtgtttcctggcattcaaagtagtccattcttttttatttctttttttttttttttttttttttgatacgaagtctccctctgtcgcccaggctggagtgcagtggcgtgagctcggtccactgcaacctccgcctcccgggttcaagtgattcttgtgccttagcatcctaaatagttgggactactggcatgtaccaccatacctggctaatttatatatatatatatatatatatatatatatatatatatatatttttttttttttttttttttgaggcagagtctagctctgtcacccaggctgaagtacagtggcgcgatcttggctcactgcaacctctgcctcctgggttcaagcaattctcctgcctcagcctcccgagtagctgggattacaggcgcccaccaccaggcgcctgtatttttgtatttttagtagagacaggatttcactgtgttggccaggctggtctcgaactcctgacctcaggtgatccacccgcctcggcctcccaaagtgctgggattacaagcgtgagctaccgcgcccagccaatttttgtatttttactagagatggggtttcactgtgttggccagactggtcttgaactcttgacctcaagcgatctgcctgcctctgcctccctaaatgctggaattgcaggcgtgagccaccatgcctagccccagagaagtccatttttatctcttacctatccagttggctcctatgaatccatccctgaattatattttatctgtttctcctttttaatttatttaaacttgatttaagagacagtgtcttactctgttgcccaggctggagtgcagtggcgtgggtcgtagctcactgtatgctcaacttcctgggctcaaatgatccacccatctaggcctcttgctttttaaatttctgtatcttaattatagtctgcttctctagcctcgacttttgcagggactcctttctttgtattcttgcccttagcctcttcttcctctgacttcccgcaacacagcccagaccatatttttgaatacatggactgaagaatgtaattttcctttttttcaagttttgttctgtggggaaaaaaatcctagcactgttggaaatactgcatactataaatttatcttagaaatttacaatctatatttgtatttacggctctaagaagttctgcagttaagaaaactcgtgatcatttgtatctcttggattgctttcggttataataacagatgtcataattcagagtggcttaaacaataagggaacttttattccaggatgatagggcatccaaaggtaggaggagtccaggtgtcttgtgattaagtcacttgctgtctttctctccatttttcttcgctttgccttcatctgtgtcttggcttgtttccctgtcaaaatacaggtgtttgcagcaattagggtgatttgcctccacgttcacaaaccaaagaggagacaaagaagcagcccaagtggtcctgatcatggaataagagcgctttcctctagtctaggccaatttatttcacacgtttactattgaccattaacacatgctggagggaggggttgcagagggctgatggtgcccatgcttctgtctttgaagccagaaagtaggattatgatgactggcttagatccatcaagaccccatctggagttggacgtggggatagcctcgcctaagtcaggagaccttcatggcgaagggatgggtacctgggcaaatcagagttttcatgggaaggaaggaggaggaaagtattcaagtaaacagccaacactatccactgtgacttggtttaagccagcattttgagtgtgaatactgtttttcatgggatacccattcttcaaactagagtttgtaggatgtgtcatggagattgttcttcaatgaagttcaagtattcccctttagcattcaacactttgacctttgattaagctattgcctctcctttccatttatcgaaactgttctttcagattcaagagtgctggttcacactgaggtataaaacttggtgtattgtattctagttatacttctgcacacatctgtctctggtactaatctataaatccctagcacagtgtctggaatgtagacatagaatagactcaagaactgtttgtcaaattcattcctagagtgcaattcagacatccccccttcctagcttcctccatcattcttgaatgggaatctggtgtccactatatctgctatgttctaagttctctgctagaagtatgagggtggttagaaagcaattaaatatgccactgaaatagaggtggtatctttgatggtagatgaggtgttcatggcatgatgagaatataattgagtttggctgtagtggggggttggaagaggatcctagaactgagacctgaagggggaagcactgtttctttcttggtgcttccacagcactctgctcattttctcacaccacttattttttcctgccttgatttttagttgctgttggttctgttttcctgactctactagaagctgtgtgtctttgcagggattggggtttcttcatctctgtgtcctgactggtgtccacagtgctttgcaaatagcataagcaggtctttatcaagagtgtgaagaagacactgtatgtgctcctctaaaaagtctcaaagatagatatttttatggcccctaaattgagttttttccatgctaaatatgtgtctgttggcttatattcatgccttcataatctccaagatttttctgtactaacaagaatctgactttggcgttagaattattagtagttcctagtgtattgtctttatctccaaagcattctcaagccatacctatgaattgcatagtcatatatgctaagaggagtatgtaagacatggcagcttattgagtacagatggtccttcgttaaacagatatttaccgaccacttaactggcatagcttgggtctctgcaaagcggatactgagaatagcatgcagcatgtttactagggagtgctcttagcatcagtacctgtggaagggagtgaaaagaagcaggactaggcagagggagttgagctgtgatgcagtctccacaaaggcttcagctggttccatgttaggggtgagttcagagttattctgagttgggaagaggggaactgagccttttcacctcttcattgattagccattgcatgtgggcttcccttgaaaggtggtgtgaccttcagcagaggcagtggcaacggacagatgaccaagggtggccatctgacagcatttctacctagcagagggggtataagtcctttattcctgaagggaaatctggcgtacactatatctgctgtgttctaagtcctctgctagaagtatgagggtggttagaaagcaattatatacgcctttacaattgaggtggtatctttgatggtaaatgaggtgctcatggcgtgatgagaaaatagttgagtttggttgtagtgggggcttggaagaaagtcctagaactgagacctgaaggggaaagcatgttagcaggctaaggaaagtgggaatggcaggtgtgattgccaagggatatagagtatgtctcttttaagaaagtaaaataaattcttcatgttgggaatatcattgggagttggggtgaggcttgcaaataggatgaccatctaatgtattatacaaactggggccatttctgagagtgatcatgtaattaataatgctggggacagcaagtgaaaacctgggtgaattgtatggtcaccctacttataagacatggttgtgcagatttggattccatctgagaaccaatggtaaattactgagtggccacttgacatctccccatagtttttggttatgagcatggattctgatgtcagattcccataggtgcatattttggctctatcacttgctagttgtaaaaccatggacaagcccatttaggttttgtcagcctcaattttcttatctgcaaaatgcagatagcaataaatctatcttatgttcaaagataaacttagacacatttacattttcatgactttatttgagcatttagggattcatgaattgggcagcaccagaccaccagtggttcagggctctgttgatagggggtaagagggaaacttttataaggtgtcgtggaagcaaaacaaaaaatatttgattgattgaagtggaaagtctggttagaggtaagtttctgtttcttgcttggtaaagtagtctctagttagagatttgttggtgatttcagattggttgagcttaagtttcattttgcagcttatattgggttgagtttcagtttgcttacataggaacccaaggcacaggaaccatgtcgtctcagcctaatggcctcctaattaattttattgacacttatgtgcattaatacacataaagtggaattgaagcattgaatcggagcagtgctgagcagagaggagggctgaggaatagttcctgggacagagtaagtcctcagtgactgtgaattgccattgttattattttaaatgggaatagcaaggtcaggcttgggttttaaggtgatcacccagcatccagaggggagaaccagatgtagaggatgtatttgtctgttctcacactgttactaaacacacacccaagactggataatttataaaggaaagagatttaattgactcacagttccacatggctggggaggcctcacaatcatggcggaaggcaaaggagaagcaaaggcatgtcttacatggtggcaggcaagggagtacgtataggggaattcctctttataaaactatcagatcttgtgagacttagtcactatcacaagcacagcatgggaaagacccatccccataattcagttacctgctacactgggtccctctcgcaacatgtgagaattatgggagctacaattcaagatgagatttgggtggggacacagccaagccatattattccacccctgacccctcccaaatctcatgtcctcacatttcaaaaccaaccatgccttcccaacagtcccccaaagtcttaactcatttcagcattaactcagaagtccacagtctaaagtctcatctgagacaaggcaagtctcttctgcctatgagcctgtaaaaccaaaatcaagttagttacttcccagatacaatggttacaatgtggatacaggcattgggtaaatacacccattccaaatgggagaaattgaccaagacaaaaaggctacaggcctcatgcaagtctgaaatccagtagggcagttattaaaccttaaagttccaaaatgatttcctttgactccatgtctcacattcaggggacactgatgcaacaggtgggctcccacaacctggggcagctccgcccttgtggatttgcaggctacagtcccacttctggctgctttcatgggctagcattgagtgcagcttttccagacgcatggtacaagcggtcagtggatcttccattctgggttctggatgacggtggccctcttctcacagatccactagacagtgccccagtgggcactctgtgtggggctcgaaccccacatttcccttccatactgccctagcagaggttctctgtgaatgccctgtcactgcagcagacttctgcctggacatccaagcatttccatacatcctctgaaatctaggaggaggttttcaaacgtcagttcttgacttctgtgcacccacgggctcaataccatgtggaggctgccaaggcatagggcttgcatcctctgaagtcacagcccaagctgtacattggtctcttttagccatggctgggatgcagggaaccaagtcctgagactgcgcaaaggagtacgaacctgagtctgcctcacaaaatcattttttcctcctaggcttccatgcccatgataggagggactgtcatgaagacctctgatatgccctggggacattttctccattgtcttggtgattaagatttggctcctcgttacttatgctaatttctgcaggcagcttgaatttctcctcagaagatgtgtttttcttttctcttgcatcatg
